(19) United States
(12) Patent Application Publication
(10) Pub. No.: US 2009/0215042 A1
(43) Pub. Date: Aug. 27, 2009

(54) NOVEL NUCLEOTIDE AND AMINO ACID SEQUENCES, AND ASSAYS AND METHODS OF USE THEREOF FOR DIAGNOSIS

(75) Inventors: Osnat Sella-Tavor, Kfar Kish (IL); Sarah Pollock, Tel Aviv (IL); Gad S. Cojocaru, Ramat-Hasharon (IL); Amit Novik, Tel-Mond (IL); Lily Bazak, Givatayim (IL); Elena Tsypkin, Tel Aviv (IL); Shira Wallach, Hod Hasharon (IL); Shirley Sameah-Greenwald, Kfar Saba (IL)

Correspondence Address: WINSTON & STRAWN LLP;PATENT DEPARTMENT, 1700 K STREET, N.W., WASHINGTON, DC, 20006, US

(73) Assignee: Compugen Ltd.

(21) Appl. No.: 11/913,171

(22) PCT Filed: Jun. 8, 2006
(86) PCT No.: PCT/IL06/00676

§ 371 Date: May 2, 2008

Related U.S. Application Data
(60) Provisional application No. 60/688,320, filed on Jun. 8, 2005.
(60) Provisional application No. 60/699,427, filed on Jul. 15, 2005.
(60) Provisional application No. 60/704,414, filed on Aug. 2, 2005.

(51) Int. Cl. C12Q 1/68; C07H 21/00; C12N 15/64; C12N 5/06; G01N 33/53; C12P 21/00; C07K 16/18

(52) U.S. Cl. 435/6; 536/23.1; 435/320.1; 435/325; 435/69.1; 530/387.9; 435/7.1; 435/7.92

(57) ABSTRACT

Novel splice variants, amino acid sequences and nucleotide sequences thereof, and methods of using same.

### FIELD OF THE INVENTION

[0001] The present invention is related to novel nucleotide and protein sequences, and assays and methods of use thereof.

### BACKGROUND OF THE INVENTION

[0002] Diagnostic markers are important for early diagnosis of many diseases, as well as predicting response to treatment, monitoring treatment and determining prognosis of such diseases.

[0003] Serum markers are examples of such diagnostic markers and are used for diagnosis of many different diseases. Such serum markers typically encompass secreted proteins and/or peptides; however, some serum markers may be released to the blood upon tissue lysis, such as from myocardial infarction (for example Troponin-I). Serum markers can also be used as risk factors for disease (for example base-line levels of CRP, as a predictor of cardiovascular disease), to monitor disease activity and progression (for example, determination of CRP levels to monitor acute phase inflammatory response) and to predict and monitor drug response (for example, as shedded fragments of the protein Erb-B2).

[0004] Immunohistochemistry (IHC) is the study of distribution of an antigen of choice in a sample based on specific antibody-antigen binding, typically on tissue slices. The antibody features a label which can be detected, for example as a stain which is detectable under a microscope. The tissue slices are prepared by being fixed. IHC is therefore particularly suitable for antibody-antigen reactions that are not disturbed or destroyed by the process of fixing the tissue slices.

[0005] IHC permits determining the localization of binding, and hence mapping of the presence of the antigen within the tissue and even within different compartments in the cell. Such mapping can provide useful diagnostic information, including:

1) the histological type of the tissue sample
2) the presence of specific cell types within the sample
3) information on the physiological and/or pathological state of cells (e.g. which phase of the cell-cycle they are in)
4) the presence of disease related changes within the sample
5) differentiation between different specific disease subtypes where it is already known the tissue is of disease state (for example, the differentiation between different tumor types when it is already known the sample was taken from cancerous tissue).

[0006] IHC information is valuable for more than diagnosis. It can also be used to determine prognosis and therapy treatment (as in the case of HER-2 in breast cancer) and monitor disease.

[0007] IHC protein markers could be from any cellular location. Most often these markers are membrane proteins but secreted proteins or intracellular proteins (including intranuclear) can be used as an IHC marker too.

[0008] IHC has at least two major disadvantages. It is performed on tissue samples and therefore a tissue sample has to be collected from the patient, which most often requires invasive procedures like biopsy associated with pain, discomfort, hospitalization and risk of infection. In addition, the interpretation of the result is observer dependant and therefore subjective. There is no measured value but rather only an estimation (on a scale of 1-4) of how prevalent the antigen on target is.

### SUMMARY OF THE INVENTION

[0009] The present invention provides, in different embodiments, many novel amino acid and nucleic acid sequences, which may optionally be used as diagnostic markers.

[0010] For example, the present invention provides a number of different variants of known serum proteins, which may optionally be used as diagnostic markers, preferably as serum markers, or optionally as IHC markers. The present invention therefore overcomes the many deficiencies of the background art with regard to the need to obtain tissue samples and subjective interpretations of results. For example, serum markers require only a simple blood test and their result is typically a scientifically measured number. As IHC markers, the variants of the present invention may also provide different and/or better measurement parameters for various diseases and/or pathological conditions. The markers presented in the present invention can also potentially be used for in-vivo imaging applications.

[0011] The present invention also provides a number of different variants of known IHC proteins, which may optionally be used as diagnostic markers, preferably as serum markers, or optionally as IHC markers. The present invention therefore overcomes the many deficiencies of the background art with regard to the need to obtain tissue samples and subjective interpretations of results. For example, serum markers require only a simple blood test and their result is typically a scientifically measured number. As IHC markers, the variants of the present invention may also provide different and/or better measurement parameters for various diseases and/or pathological conditions.

[0012] Other variants are also provided by the present invention as described in greater detail below.

[0013] The diseases for which such variants may be useful diagnostic markers are described in greater detail below for each of the variants. The variants themselves are described by “cluster” or by gene, as these variants are splice variants of known proteins. Therefore, a “marker-detectable disease” refers to a disease that may be detected by a particular marker, with regard to the description of such diseases below. The markers of the present invention, alone or in combination, show a high degree of differential detection between disease and non-disease states.

[0014] The present invention therefore also relates to diagnostic assays for disease detection optionally and preferably in a biological sample taken from a subject (patient), which is more preferably some type of body fluid or secretion including but not limited to seminal plasma, blood, serum, urine, prostatic fluid, seminal fluid, semen, the external secretions of the skin, respiratory, intestinal, and genitourinary tracts, tears, cerebrospinal fluid, sputum, saliva, milk, peritoneal fluid, pleural fluid, cyst fluid, broncho alveolar lavage, lavage of the reproductive system and/or lavage of any other part of the body or system in the body, and stool or a tissue sample. The term may also optionally encompass samples of in vivo cell culture constituents. The sample can optionally be diluted with a suitable eluant before contacting the sample to an antibody and/or performing any other diagnostic assay.

[0015] An isolated chimeric polypeptide encoding for N56180_P2 (SEQ ID NO:84), comprising a first amino acid sequence being at least about 90% or preferably at least about 95% homologous to amino acids 1-203 of CAQ2_HUMAN (SEQ ID NO:83), which also corresponds to amino acids 1-203 of N56180_P2 (SEQ ID NO:84), and a second amino acid sequence being at least 70%, optionally at least 80%, preferably at least 85%, more preferably at least 90% and most preferably at least 95% homologous to a polypeptide having the sequence LWLTPVIPTLWEADGGGLHEPWSWRPAWATWLQRNYL (SEQ ID NO: 628) corresponding to amino acids 204-240 of N56180_P2 (SEQ ID NO:84), wherein said first amino acid sequence and second amino acid sequence are contiguous and in a sequential order.

[0016] An isolated polypeptide encoding for a tail of N56180_P2 (SEQ ID NO:84), comprising a polypeptide being at least 70%, optionally at least about 80%, preferably at least about 85%, more preferably at least about 90% and most preferably at least about 95% homologous to the sequence LWLTPVIPTLWEADGGGLHEPWSWRPAWATWLQRNYL (SEQ ID NO: 628) in N56180_P2 (SEQ ID NO:84).

[0017] An isolated chimeric polypeptide encoding for N56180_P4 (SEQ ID NO:85), comprising a first amino acid sequence being at least about 90% or preferably at least about 95% homologous to amino acids 1-78 of CAQ2 HUMAN (SEQ ID NO:83), which also corresponds to amino acids 1-78 of N56180_P4 (SEQ ID NO:85), a second amino acid sequence being at least 70%, optionally at least 80%, preferably at least 85%, more preferably at least 90% and most preferably at least 95% homologous to a polypeptide having the sequence HWQISQWWLHFQTPREEGKMKLLELSESADGAAWKRWGGNSNTHRIQ (SEQ ID NO: 629) corresponding to amino acids 79-125 of N56180_P4 (SEQ ID NO:85), and a third amino acid sequence being at least about 90% or preferably at least about 95% homologous amino acids 79-399 of CAQ2_HUMAN (SEQ ID NO:83), which also corresponds to amino acids 126-446 of N56180_P4 (SEQ ID NO:85), wherein said first amino acid sequence, second amino acid sequence and third amino acid sequence are contiguous and in a sequential order.

[0018] An isolated polypeptide encoding for an edge portion of N56180_P4 (SEQ ID NO:85), comprising an amino acid sequence being at least 70%, optionally at least about 80%, preferably at least about 85%, more preferably at least about 90% and most preferably at least about 95% homologous to the sequence encoding for HWQISQWWLHFQTPREEGKMKLLELSESADGAAWKRWGGNSNTHRIQ (SEQ ID NO: 629), corresponding to N56180_P4 (SEQ ID NO:85).

[0019] An isolated chimeric polypeptide encoding for N56180_P5 (SEQ ID NO:86), comprising a first amino acid sequence being at least about 90% or preferably at least about 95% homologous amino acids 1-140 of CAQ2_HUMAN (SEQ ID NO:83), which also corresponds to amino acids 1-140 of N56180_P5 (SEQ ID NO:86), and a second amino acid sequence being at least about 90% or preferably at least about 95% homologous to amino acids 203-399 of CAQ2_HUMAN (SEQ ID NO:83), which also corresponds to amino acids 141-337 of N56180_P5 (SEQ ID NO:86), wherein said first amino acid sequence and second amino acid sequence are contiguous and in a sequential order.

[0020] An isolated chimeric polypeptide encoding for an edge portion of N56180_P5 (SEQ ID NO:86), comprising a polypeptide having a length “n”, wherein n is at least about 10 amino acids in length, optionally at least about 20 amino acids in length, preferably at least about 30 amino acids in length, more preferably at least about 40 amino acids in length and most preferably at least about 50 amino acids in length, wherein at least two amino acids comprise DV, having a structure as follows: a sequence starting from any of amino acid numbers 140−x to 140; and ending at any of amino acid numbers 141+((n−2)−x), in which x varies from 0 to n−2.

[0021] An isolated chimeric polypeptide encoding for N56180_P6 (SEQ ID NO:87), comprising a first amino acid sequence being at least 70%, optionally at least 80%, preferably at least 85%, more preferably at least 90% and most preferably at least 95% homologous to a polypeptide having the sequence NETEAEQSYV (SEQ ID NO: 631) corresponding to amino acids 1-10 of N56180_P6 (SEQ ID NO:87), a second amino acid sequence being at least about 90% or preferably at least about 95% homologous to amino acids 18-106 of CAQ2_HUMAN (SEQ ID NO:83), which also corresponds to amino acids 11-99 of N56180_P6 (SEQ ID NO:87), a third amino acid sequence bridging amino acid sequence comprising of D, and a fourth amino acid sequence being at least about 90% or preferably at least about 95% homologous amino acids 179-399 of CAQ2_HUMAN (SEQ ID NO:83), which also corresponds to amino acids 101-321 of N56180_P6 (SEQ ID NO:87), wherein said first amino acid sequence, second amino acid sequence, third amino acid sequence and fourth amino acid sequence are contiguous and in a sequential order.

[0022] An isolated polypeptide encoding for a head of N56180_P6 (SEQ ID NO:87), comprising a polypeptide being at least 70%, optionally at least about 80%, preferably at least about 85%, more preferably at least about 90% and most preferably at least about 95% homologous to the sequence NETEAEQSYV (SEQ ID NO: 631) of N56180_P6 (SEQ ID NO:87).

[0023] An isolated polypeptide encoding for an edge portion of N56180_P6 (SEQ ID NO:87), comprising a polypeptide having a length “n”, wherein n is at least about 10 amino acids in length, optionally at least about 20 amino acids in length, preferably at least about 30 amino acids in length, more preferably at least about 40 amino acids in length and most preferably at least about 50 amino acids in length, wherein at least two amino acids comprise LDY having a structure as follows (numbering according to N56180_P6 (SEQ ID NO:87)): a sequence starting from any of amino acid numbers 99−x to 99; and ending at any of amino acid numbers 101+((n−2)−x), in which x varies from 0 to n−2.

[0024] An isolated chimeric polypeptide encoding for N56180_P7 (SEQ ID NO:88), comprising a first amino acid sequence being at least 70%, optionally at least 80%, preferably at least 85%, more preferably at least 90% and most preferably at least 95% homologous to a polypeptide having the sequence MSSWLSAGSPSSLSV (SEQ ID NO: 632) corresponding to amino acids 1-15 of N56180_P7 (SEQ ID NO:88), and a second amino acid sequence being at least about 90% or preferably at least about 95% homologous amino acids 203-399 of CAQ2_HUMAN (SEQ ID NO:83), which also corresponds to amino acids 16-212 of N56180_P7 (SEQ ID NO:88), wherein said first amino acid sequence and second amino acid sequence are contiguous and in a sequential order.

[0025] An isolated polypeptide encoding for a head of N56180_P7 (SEQ ID NO:88), comprising a polypeptide being at least 70%, optionally at least about 80%, preferably at least about 85%, more preferably at least about 90% and most preferably at least about 95% homologous to the sequence MSSWLSAGSPSSLSV (SEQ ID NO: 632) of N56180_P7 (SEQ ID NO:88).

[0026] An isolated chimeric polypeptide encoding for N56180_P8 (SEQ ID NO:89), comprising a first amino acid sequence being at least 70%, optionally at least 80%, preferably at least 85%, more preferably at least 90% and most preferably at least 95% homologous to a polypeptide having the sequence MCRGYSTLLNPVS (SEQ ID NO: 633) corresponding to amino acids 1-13 of N56180_P8 (SEQ ID NO:89), and a second amino acid sequence being at least about 90% or preferably at least about 95% homologous to amino acids 280-399 of CAQ2_HUMAN (SEQ ID NO:83), which also corresponds to amino acids 14-133 of N56180_P8 (SEQ ID NO:89), wherein said first amino acid sequence and second amino acid sequence are contiguous and in a sequential order.

[0027] An isolated polypeptide encoding for a head of N56180_P8 (SEQ ID NO:89), comprising a polypeptide being at least 70%, optionally at least about 80%, preferably at least about 85%, more preferably at least about 90% and most preferably at least about 95% homologous to the sequence MCRGYSTLLNPVS (SEQ ID NO: 633) of N56180_P8 (SEQ ID NO:89).

[0028] An isolated chimeric polypeptide encoding for N56180_P9 (SEQ ID NO:90), comprising a first amino acid sequence being at least about 90% or preferably at least about 95% homologous to amino acids 1-246 of CAQ2_HUMAN (SEQ ID NO:83), which also corresponds to amino acids 1-246 of N56180_P9 (SEQ ID NO:90), and a second amino acid sequence being at least 70%, optionally at least 80%, preferably at least 85%, more preferably at least 90% and most preferably at least 95% homologous to a polypeptide having the sequence SRNWTQ (SEQ ID NO: 634) corresponding to amino acids 247-252 of N56180_P9 (SEQ ID NO:90), wherein said first amino acid sequence and second amino acid sequence are contiguous and in a sequential order.

[0029] An isolated polypeptide encoding for a tail of N56180_P9 (SEQ ID NO:90), comprising a polypeptide being at least 70%, optionally at least about 80%, preferably at least about 85%, more preferably at least about 90% and most preferably at least about 95% homologous to the sequence SRNWTQ (SEQ ID NO: 634) in N56180_P9 (SEQ ID NO:90).

[0030] An isolated chimeric polypeptide encoding for S67314_PEA_{—}1_P4 (SEQ ID NO:114), comprising a first amino acid sequence being at least about 90% or preferably at least about 95% homologous to amino acids 1-116 of FABH_HUMAN_V1 (SEQ ID NO:113), which also corresponds to amino acids 1-116 of S67314_PEA_{—}1_P4 (SEQ ID NO:114), and a second amino acid sequence being at least 70%, optionally at least 80%, preferably at least 85%, more preferably at least 90% and most preferably at least 95% homologous to a polypeptide having the sequence VRWATLELYLIGYYYCSFSQACSKKPSPPLRAVEAGTREWLWVRVVSGGNFLCSGFGLTQAGTQI LPYRLHDCGQITFSKCNCKTGINNTNLVGLLGSL (SEQ ID NO: 635) corresponding to amino acids 117-215 of S67314_PEA_{—}1_P4 (SEQ ID NO:114), wherein said first amino acid sequence and second amino acid sequence are contiguous and in a sequential order.

[0031] An isolated polypeptide encoding for a tail of S67314_PEA_{—}1_P4 (SEQ ID NO:114), comprising a polypeptide being at least 70%, optionally at least about 80%, preferably at least about 85%, more preferably at least about 90% and most preferably at least about 95% homologous to the sequence VRWATLELYLIGYYYCSFSQACSKKPSPPLRAVEAGTREWLWVRVVSGGNFLCSGFGLTQAGTQI LPYRLHDCGQITFSKCNCKTGINNTNLVGLLGSL (SEQ ID NO: 635) in S67314_PEA_{—}1_P4 (SEQ ID NO:114).

[0032] An isolated chimeric polypeptide encoding for S67314_PEA_{—}1_P5 (SEQ ID NO:115), comprising a first amino acid sequence being at least about 90% or preferably at least about 95% homologous amino acids 1-116 of FABH_HUMAN_V1 (SEQ ID NO:113), which also corresponds to amino acids 1-116 of S67314_PEA_{—}1_P5 (SEQ ID NO:115), and a second amino acid sequence being at least 70%, optionally at least 80%, preferably at least 85%, more preferably at least 90% and most preferably at least 95% homologous to a polypeptide having the sequence DVLTAWPSIYRRQVKVLREDEITILPWHLQWSREKATKLLRPTLPSYNNHGWEELRVGKSIV (SEQ ID NO: 636) corresponding to amino acids 117-178 of S67314_PEA_{—}1_P5 (SEQ ID NO:115), wherein said first amino acid sequence and second amino acid sequence are contiguous and in a sequential order.

[0033] An isolated polypeptide encoding for a tail of S67314_PEA_{—}1_P5 (SEQ ID NO:115), comprising a polypeptide being at least 70%, optionally at least about 80%, preferably at least about 85%, more preferably at least about 90% and most preferably at least about 95% homologous to the sequence DVLTAWPSIYRRQVKVLREDEITILPWHLQWSREKATKLLRPTLPSYNNHGWEELRVGKSIV (SEQ ID NO: 636) in S67314_PEA_{—}1_P5 (SEQ ID NO:115).

[0034] An isolated chimeric polypeptide encoding for S67314_PEA_{—}1_P6 (SEQ ID NO:116), comprising a first amino acid sequence being at least about 90% or preferably at least about 95% homologous amino acids 1-116 of FABH_HUMAN_V1 (SEQ ID NO:113), which also corresponds to amino acids 1-116 of S67314_PEA_{—}1_P6 (SEQ ID NO:116), and a second amino acid sequence being at least 70%, optionally at least 80%, preferably at least 85%, more preferably at least 90% and most preferably at least 95% homologous to a polypeptide having the sequence MEKLQLRNVK (SEQ ID NO: 637) corresponding to amino acids 117-126 of S67314_PEA_{—}1_P6 (SEQ ID NO:116), wherein said first amino acid sequence and second amino acid sequence are contiguous and in a sequential order.

[0035] An isolated polypeptide encoding for a tail of S67314_PEA_{—}1_P6 (SEQ ID NO:116), comprising a polypeptide being at least 70%, optionally at least about 80%, preferably at least about 85%, more preferably at least about 90% and most preferably at least about 95% homologous to the sequence MEKLQLRNVK (SEQ ID NO: 637) in S67314_PEA_{—}1_P6 (SEQ ID NO:116).

[0036] An isolated chimeric polypeptide encoding for S67314_PEA_{—}1_P7 (SEQ ID NO:117), comprising a first amino acid sequence being at least about 90% or preferably at least about 95% homologous to amino acids 1-24 of FABH_HUMAN_V1 (SEQ ID NO:113), which also corresponds to amino acids 1-24 of S67314_PEA_{—}1_P7 (SEQ ID NO:117), a second amino acid sequence being at least 70%, optionally at least 80%, preferably at least 85%, more preferably at least 90% and most preferably at least 95% homologous to a polypeptide having the sequence AHILITFPLPS (SEQ ID NO: 638) corresponding to amino acids 25-35 of S67314_PEA_{—}1_P7 (SEQ ID NO:117), and a third amino acid sequence being at least about 90% or preferably at least about 95% homologous amino acids 25-133 of FABH_HUMAN_V1 (SEQ ID NO:113), which also corresponds to amino acids 36-144 of S67314_PEA_{—}1_P7 (SEQ ID NO:117), wherein said first amino acid sequence, second amino acid sequence and third amino acid sequence are contiguous and in a sequential order.

[0037] An isolated polypeptide encoding for an edge portion of S67314_PEA_{—}1_P7 (SEQ ID NO:117), comprising an amino acid sequence being at least 70%, optionally at least about 80%, preferably at least about 85%, more preferably at least about 90% and most preferably at least about 95% homologous to the sequence encoding for AHILITFPLPS (SEQ ID NO: 638), corresponding to S67314_PEA_{—}1_P7 (SEQ ID NO:117).

[0038] An isolated chimeric polypeptide encoding for HUMNATPEP_PEA_{—}1_P2 (SEQ ID NO:139), comprising a first amino acid sequence being at least about 90% or preferably at least about 95% homologous to amino acids 1-129 of ANFB_HUMAN (SEQ ID NO:138), which also corresponds to amino acids 1-129 of HUMNATPEP_PEA_{—}1_P2 (SEQ ID NO:139), and a second amino acid sequence being at least 70%, optionally at least 80%, preferably at least 85%, more preferably at least 90% and most preferably at least 95% homologous to a polypeptide having the sequence GKHPLPPRPPSPIPVCDTVRVTLGFVVSGNHTL (SEQ ID NO: 640) corresponding to amino acids 130-162 of HUMNATPEP_PEA_{—}1_P2 (SEQ ID NO:139), wherein said first amino acid sequence and second amino acid sequence are contiguous and in a sequential order.

[0039] An isolated polypeptide encoding for a tail of HUMNATPEP_PEA_{—}1_P2 (SEQ ID NO:139), comprising a polypeptide being at least 70%, optionally at least about 80%, preferably at least about 85%, more preferably at least about 90% and most preferably at least about 95% homologous to the sequence GKHPLPPRPPSPIPVCDTVRVTLGFVVSGNHTL (SEQ ID NO: 640) in HUMNATPEP_PEA_{—}1_P2 (SEQ ID NO:139).

[0040] An isolated chimeric polypeptide encoding for HUMNATPEP_PEA_{—}1_P3 (SEQ ID NO:140), comprising a first amino acid sequence being at least about 90% or preferably at least about 95% homologous to amino acids 1-44 of ANFB_HUMAN (SEQ ID NO:138), which also corresponds to amino acids 1-44 of HUMNATPEP_PEA_{—}1_P3 (SEQ ID NO:140), and a second amino acid sequence being at least 70%, optionally at least 80%, preferably at least 85%, more preferably at least 90% and most preferably at least 95% homologous to a polypeptide having the sequence VRAEGSSGGLDSSNERVLTCCPKRPSSFLWN (SEQ ID NO: 641) corresponding to amino acids 45-75 of HUMNATPEP_PEA_{—}1_P3 (SEQ ID NO:140), wherein said first amino acid sequence and second amino acid sequence are contiguous and in a sequential order.

[0041] An isolated polypeptide encoding for a tail of HUMNATPEP_PEA_{—}1_P3 (SEQ ID NO:140), comprising a polypeptide being at least 70%, optionally at least about 80%, preferably at least about 85%, more preferably at least about 90% and most preferably at least about 95% homologous to the sequence VRAEGSSGGLDSSNERVLTCCPKRPSSFLWN (SEQ ID NO: 641) in HUMNATPEP_PEA_{—}1_P3 (SEQ ID NO:140).

[0042] An isolated chimeric polypeptide encoding for HUMNATPEP_PEA_{—}1_P7 (SEQ ID NO:141), comprising a first amino acid sequence being at least about 90% or preferably at least about 95% homologous to amino acids 93-134 of ANFB_HUMAN (SEQ ID NO:138), which also corresponds to amino acids 1-42 of HUMNATPEP_PEA_{—}1_P7 (SEQ ID NO:141).

[0043] An isolated chimeric polypeptide encoding for HUMCDDANF_PEA_{—}1_P6 (SEQ ID NO:165), comprising a first amino acid sequence being at least about 90% or preferably at least about 95% homologous to amino acids 1-150 of ANF_HUMAN (SEQ ID NO:164), which also corresponds to amino acids 1-150 of HUMCDDANF_PEA_{—}1_P6 (SEQ ID NO:165), and a second amino acid sequence being at least 70%, optionally at least 80%, preferably at least 85%, more preferably at least 90% and most preferably at least 95% homologous to a polypeptide having the sequence VRGTGDGNGMGWTLLGDTFSRKGTNAEAHSLSSFCPNTQSAPWVSGHAIYCP (SEQ ID NO: 642) corresponding to amino acids 151-202 of HUMCDDANF_PEA_{—}1_P6 (SEQ ID NO:165), wherein said first amino acid sequence and second amino acid sequence are contiguous and in a sequential order.

[0044] An isolated polypeptide encoding for a tail of HUMCDDANF_PEA_{—}1_P6 (SEQ ID NO:165), comprising a polypeptide being at least 70%, optionally at least about 80%, preferably at least about 85%, more preferably at least about 90% and most preferably at least about 95% homologous to the sequence VRGTGDGNGMGWTLLGDTFSRKGTNAEAHSLSSFCPNTQSAPWVSGHAIYCP (SEQ ID NO: 642) in HUMCDDANF_PEA_{—}1_P6 (SEQ ID NO:165).

[0045] An isolated chimeric polypeptide encoding for HUMCDDANF_PEA_{—}1_P9 (SEQ ID NO:166), comprising a first amino acid sequence being at least about 90% or preferably at least about 95% homologous to amino acids 1-41 of ANF_HUMAN (SEQ ID NO:164), which also corresponds to amino acids 1-41 of HUMCDDANF_PEA_{—}1_P9 (SEQ ID NO:166), and a second amino acid sequence being at least 70%, optionally at least 80%, preferably at least 85%, more preferably at least 90% and most preferably at least 95% homologous to a polypeptide having the sequence VGPGKRVQSGARGLSDAVLTPLDFLQVSEVYPFPCIFLF (SEQ ID NO: 643) corresponding to amino acids 42-80 of HUMCDDANF_PEA_{—}1_P9 (SEQ ID NO:166), wherein said first amino acid sequence and second amino acid sequence are contiguous and in a sequential order.

[0046] An isolated polypeptide encoding for a tail of HUMCDDANF_PEA_{—}1_P9 (SEQ ID NO:166), comprising a polypeptide being at least 70%, optionally at least about 80%, preferably at least about 85%, more preferably at least about 90% and most preferably at least about 95% homologous to the sequence VGPGKRVQSGARGLSDAVLTPLDFLQVSEVYPFPCIFLF (SEQ ID NO: 643) in HUMCDDANF_PEA_{—}1_P9 (SEQ ID NO:166).

[0047] An isolated chimeric polypeptide encoding for HSACMHCP_PEA_{—}1_P2 (SEQ ID NO:239), comprising a first amino acid sequence being at least about 90% or preferably at least about 95% homologous to amino acids 1-1855 of MYH6_HUMAN_V1 (SEQ ID NO:236), which also corresponds to amino acids 1-1855 of HSACMHCP_PEA_{—}1_P2 (SEQ ID NO:239), and a second amino acid sequence being at least 70%, optionally at least 80%, preferably at least 85%, more preferably at least 90% and most preferably at least 95% homologous to a polypeptide having the sequence VRRTPDTGSRCGSFFSGPTAPPSQGSSHLLLEMLLVDLTFFSRSAVSLT (SEQ ID NO: 644) corresponding to amino acids 1856-1904 of HSACMHCP_PEA_{—}1_P2 (SEQ ID NO:239), wherein said first amino acid sequence and second amino acid sequence are contiguous and in a sequential order.

[0048] An isolated polypeptide encoding for a tail of HSACMHCP_PEA_{—}1_P2 (SEQ ID NO:239), comprising a polypeptide being at least 70%, optionally at least about 80%, preferably at least about 85%, more preferably at least about 90% and most preferably at least about 95% homologous to the sequence VRRTPDTGSRCGSFFSGPTAPPSQGSSHLLLEMLLVDLTFFSRSAVSLT (SEQ ID NO: 644) in HSACMHCP_PEA_{—}1_P2 (SEQ ID NO:239).

[0049] An isolated chimeric polypeptide encoding for HSACMHCP_PEA_{—}1_P2 (SEQ ID NO:239), comprising a first amino acid sequence being at least about 90% or preferably at least about 95% homologous to amino acids 1-1855 of MYH6_HUMAN_V1 (SEQ ID NO:236), which also corresponds to amino acids 1-1855 of HSACMHCP_PEA_{—}1_P2 (SEQ ID NO:239), and a second amino acid sequence being at least 70%, optionally at least 80%, preferably at least 85%, more preferably at least 90% and most preferably at least 95% homologous to a polypeptide having the sequence VRRTPDTGSRCGSFFSGPTAPPSQGSSHLLLEMLLVDLTFFSRSAVSLT (SEQ ID NO: 644) corresponding to amino acids 1856-1904 of HSACMHCP_PEA_{—}1_P2 (SEQ ID NO:239), wherein said first amino acid sequence and second amino acid sequence are contiguous and in a sequential order.

[0050] An isolated polypeptide encoding for a tail of HSACMHCP_PEA_{—}1_P2 (SEQ ID NO:239), comprising a polypeptide being at least 70%, optionally at least about 80%, preferably at least about 85%, more preferably at least about 90% and most preferably at least about 95% homologous to the sequence VRRTPDTGSRCGSFFSGPTAPPSQGSSHLLLEMLLVDLTFFSRSAVSLT (SEQ ID NO: 644) in HSACMHCP_PEA_{—}1_P2 (SEQ ID NO:239).

[0051] An isolated chimeric polypeptide encoding for HSACMHCP_PEA_{—}1_P3 (SEQ ID NO:240), comprising a first amino acid sequence being at least about 90% or preferably at least about 95% homologous to amino acids 1-1326 of MYH6_HUMAN_V2 (SEQ ID NO:237), which also corresponds to amino acids 1-1326 of HSACMHCP_PEA_{—}1_P3 (SEQ ID NO:240), and a second amino acid sequence being at least 70%, optionally at least 80%, preferably at least 85%, more preferably at least 90% and most preferably at least 95% homologous to a polypeptide having the sequence VRPSGEGGQA (SEQ ID NO: 645) corresponding to amino acids 1327-1336 of HSACMHCP_PEA_{—}1_P3 (SEQ ID NO:240), wherein said first amino acid sequence and second amino acid sequence are contiguous and in a sequential order.

[0052] An isolated polypeptide encoding for a tail of HSACMHCP_PEA_{—}1_P3 (SEQ ID NO:240), comprising a polypeptide being at least 70%, optionally at least about 80%, preferably at least about 85%, more preferably at least about 90% and most preferably at least about 95% homologous to the sequence VRPSGEGGQA (SEQ ID NO: 645) in HSACMHCP_PEA_{—}1_P3 (SEQ ID NO:240).

[0053] An isolated chimeric polypeptide encoding for HSACMHCP_PEA_{—}1_P4 (SEQ ID NO:241), comprising a first amino acid sequence being at least about 90% or preferably at least about 95% homologous to amino acids 1-1508 of MYH6_HUMAN_V2 (SEQ ID NO:237), which also corresponds to amino acids 1-1508 of HSACMHCP_PEA_{—}1_P4 (SEQ ID NO:241), and a second amino acid sequence being at least 70%, optionally at least 80%, preferably at least 85%, more preferably at least 90% and most preferably at least 95% homologous to a polypeptide having the sequence GVLGVQEARDELVGGRAMQGQGEHRL (SEQ ID NO: 646) corresponding to amino acids 1509-1534 of HSACMHCP_PEA_{—}1_P4 (SEQ ID NO:241), wherein said first amino acid sequence and second amino acid sequence are contiguous and in a sequential order.

[0054] An isolated polypeptide encoding for a tail of HSACMHCP_PEA_{—}1_P4 (SEQ ID NO:241), comprising a polypeptide being at least 70%, optionally at least about 80%, preferably at least about 85%, more preferably at least about 90% and most preferably at least about 95% homologous to the sequence GVLGVQEARDELVGGRAMQGQGEHRL (SEQ ID NO: 646) in HSACMHCP_PEA_{—}1_P4 (SEQ ID NO:241).

[0055] An isolated chimeric polypeptide encoding for HSACMHCP_PEA_{—}1_P6 (SEQ ID NO:242), comprising a first amino acid sequence being at least about 90% or preferably at least about 95% homologous to amino acids 1-1763 of MYH6_HUMAN_V1 (SEQ ID NO:236), which also corresponds to amino acids 1-1763 of HSACMHCP_PEA_{—}1_P6 (SEQ ID NO:242), and a second amino acid sequence being at least 70%, optionally at least 80%, preferably at least 85%, more preferably at least 90% and most preferably at least 95% homologous to a polypeptide having the sequence VSDRPPSASPKDRNKALGPGQATVL (SEQ ID NO: 647) corresponding to amino acids 1764-1788 of HSACMHCP_PEA_{—}1_P6 (SEQ ID NO:242), wherein said first amino acid sequence and second amino acid sequence are contiguous and in a sequential order.

[0056] An isolated polypeptide encoding for a tail of HSACMHCP_PEA_{—}1_P6 (SEQ ID NO:242), comprising a polypeptide being at least 70%, optionally at least about 80%, preferably at least about 85%, more preferably at least about 90% and most preferably at least about 95% homologous to the sequence VSDRPPSASPKDRNKALGPGQATVL (SEQ ID NO: 647) in HSACMHCP_PEA_{—}1_P6 (SEQ ID NO:242).

[0057] An isolated chimeric polypeptide encoding for HSACMHCP_PEA_{—}1_P12 (SEQ ID NO:243), comprising a first amino acid sequence being at least 70%, optionally at least 80%, preferably at least 85%, more preferably at least 90% and most preferably at least 95% homologous to a polypeptide having the sequence MGLWKPGSVLSDSLFASSPCPQ (SEQ ID NO: 648) corresponding to amino acids 1-22 of HSACMHCP_PEA_{—}1_P12 (SEQ ID NO:243), and a second amino acid sequence being at least about 90% or preferably at least about 95% homologous to amino acids 528-1939 of MYH6_HUMAN_V3 (SEQ ID NO:238), which also corresponds to amino acids 23-1434 of HSACMHCP_PEA_{—}1_P12 (SEQ ID NO:243), wherein said first amino acid sequence and second amino acid sequence are contiguous and in a sequential order.

[0058] An isolated polypeptide encoding for a head of HSACMHCP_PEA_{—}1_P12 (SEQ ID NO:243), comprising a polypeptide being at least 70%, optionally at least about 80%, preferably at least about 85%, more preferably at least about 90% and most preferably at least about 95% homologous to the sequence MGLWKPGSVLSDSLFASSPCPQ (SEQ ID NO: 648) of HSACMHCP_PEA_{—}1_P12 (SEQ ID NO:243).

[0059] An isolated chimeric polypeptide encoding for HSACMHCP_PEA_{—}1_P16 (SEQ ID NO:244), comprising a first amino acid sequence being at least about 90% or preferably at least about 95% homologous to amino acids 1-527 of MYH6_HUMAN_V2 (SEQ ID NO:237), which also corresponds to amino acids 1-527 of HSACMHCP_PEA_{—}1_P16 (SEQ ID NO:244), and a second amino acid sequence being at least 70%, optionally at least 80%, preferably at least 85%, more preferably at least 90% and most preferably at least 95% homologous to a polypeptide having the sequence VPPWPHHLCPLLCHPDKVVAESLLHPRN (SEQ ID NO: 649) corresponding to amino acids 528-555 of HSACMHCP_PEA_{—}1_P16 (SEQ ID NO:244), wherein said first amino acid sequence and second amino acid sequence are contiguous and in a sequential order.

[0060] An isolated polypeptide encoding for a tail of HSACMHCP_PEA_{—}1_P16 (SEQ ID NO:244), comprising a polypeptide being at least 70%, optionally at least about 80%, preferably at least about 85%, more preferably at least about 90% and most preferably at least about 95% homologous to the sequence VPPWPHHLCPLLCHPDKVVAESLLHPRN (SEQ ID NO: 649) in HSACMHCP_PEA_{—}1_P16 (SEQ ID NO:244).

[0061] An isolated chimeric polypeptide encoding for HSCREACT_PEA_{—}1_P9 (SEQ ID NO:317), comprising a first amino acid sequence being at least about 90% or preferably at least about 95% homologous to amino acids 1-64 of CRP_HUMAN (SEQ ID NO:316), which also corresponds to amino acids 1-64 of HSCREACT_PEA_{—}1_P9 (SEQ ID NO:317), a second amino acid sequence bridging amino acid sequence comprising of H, and a third amino acid sequence being at least about 90% or preferably at least about 95% homologous to amino acids 188-224 of CRP_HUMAN (SEQ ID NO:316), which also corresponds to amino acids 66-102 of HSCREACT_PEA_{—}1_P9 (SEQ ID NO:317), wherein said first amino acid sequence, second amino acid sequence and third amino acid sequence are contiguous and in a sequential order.

[0062] An isolated polypeptide encoding for an edge portion of HSCREACT_PEA_{—}1_P9 (SEQ ID NO:317), comprising a polypeptide having a length “n”, wherein n is at least about 10 amino acids in length, optionally at least about 20 amino acids in length, preferably at least about 30 amino acids in length, more preferably at least about 40 amino acids in length and most preferably at least about 50 amino acids in length, wherein at least two amino acids comprise THE having a structure as follows (numbering according to HSCREACT_PEA_{—}1_P9 (SEQ ID NO:317)): a sequence starting from any of amino acid numbers 64−x to 64; and ending at any of amino acid numbers 66+((n−2)−x), in which x varies from 0 to n−2.

[0063] An isolated chimeric polypeptide encoding for HSCREACT_PEA_{—}1_P10 (SEQ ID NO:318), comprising a first amino acid sequence being at least about 90% or preferably at least about 95% homologous to amino acids 1-66 of CRP_HUMAN (SEQ ID NO:316), which also corresponds to amino acids 1-66 of HSCREACT_PEA_{—}1_P10 (SEQ ID NO:318).

[0064] An isolated chimeric polypeptide encoding for HSCREACT_PEA_{—}1_P12 (SEQ ID NO:319), comprising a first amino acid sequence being at least about 90% or preferably at least about 95% homologous to amino acids 1-66 of CRP_HUMAN (SEQ ID NO:316), which also corresponds to amino acids 1-66 of HSCREACT_PEA_{—}1_P12 (SEQ ID NO:319), and a second amino acid sequence being at least about 90% or preferably at least about 95% homologous to amino acids 200-224 of CRP_HUMAN (SEQ ID NO:316), which also corresponds to amino acids 67-91 of HSCREACT_PEA_{—}1_P12 (SEQ ID NO:319), wherein said first amino acid sequence and second amino acid sequence are contiguous and in a sequential order.

[0065] An isolated chimeric polypeptide encoding for an edge portion of HSCREACT_PEA_{—}1_P12 (SEQ ID NO:319), comprising a polypeptide having a length “n”, wherein n is at least about 10 amino acids in length, optionally at least about 20 amino acids in length, preferably at least about 30 amino acids in length, more preferably at least about 40 amino acids in length and most preferably at least about 50 amino acids in length, wherein at least two amino acids comprise GP, having a structure as follows: a sequence starting from any of amino acid numbers 66−x to 66; and ending at any of amino acid numbers 67+((n−2)−x), in which x varies from 0 to n−2.

[0066] An isolated chimeric polypeptide encoding for HSCREACT_PEA_{—}1_P16 (SEQ ID NO:320), comprising a first amino acid sequence being at least about 90% or preferably at least about 95% homologous to amino acids 1-160 of CRP_HUMAN (SEQ ID NO:316), which also corresponds to amino acids 1-160 of HSCREACT_PEA_{—}1_P16 (SEQ ID NO:320), and a second amino acid sequence being at least 70%, optionally at least 80%, preferably at least 85%, more preferably at least 90% and most preferably at least 95% homologous to a polypeptide having the sequence VSESGHWPGVWFGSRVLIIMS (SEQ ID NO: 650) corresponding to amino acids 161-181 of HSCREACT_PEA_{—}1_P16 (SEQ ID NO:320), wherein said first amino acid sequence and second amino acid sequence are contiguous and in a sequential order.

[0067] An isolated polypeptide encoding for a tail of HSCREACT_PEA_{—}1_P16 (SEQ ID NO:320), comprising a polypeptide being at least 70%, optionally at least about 80%, preferably at least about 85%, more preferably at least about 90% and most preferably at least about 95% homologous to the sequence VSESGHWPGVWFGSRVLIIMS (SEQ ID NO: 650) in HSCREACT_PEA_{—}1_P16 (SEQ ID NO:320).

[0068] An isolated chimeric polypeptide encoding for HSCREACT_PEA_{—}1_P22 (SEQ ID NO:321), comprising a first amino acid sequence being at least about 90% or preferably at least about 95% homologous to amino acids 1-66 of CRP_HUMAN (SEQ ID NO:316), which also corresponds to amino acids 1-66 of HSCREACT_PEA_{—}1_P22 (SEQ ID NO:321), and a second amino acid sequence being at least 70%, optionally at least 80%, preferably at least 85%, more preferably at least 90% and most preferably at least 95% homologous to a polypeptide having the sequence AFLILWLFWETPPLFHTNLVGL (SEQ ID NO: 651) corresponding to amino acids 67-88 of HSCREACT_PEA_{—}1_P22 (SEQ ID NO:321), wherein said first amino acid sequence and second amino acid sequence are contiguous and in a sequential order.

[0069] An isolated polypeptide encoding for a tail of HSCREACT_PEA_{—}1_P22 (SEQ ID NO:321), comprising a polypeptide being at least 70%, optionally at least about 80%, preferably at least about 85%, more preferably at least about 90% and most preferably at least about 95% homologous to the sequence AFLILWLFWETPPLFHTNLVGL (SEQ ID NO: 651) in HSCREACT_PEA_{—}1_P22 (SEQ ID NO:321).

[0070] An isolated chimeric polypeptide encoding for HSCREACT_PEA_{—}1_P28 (SEQ ID NO:322), comprising a first amino acid sequence being at least about 90% or preferably at least about 95% homologous to amino acids 1-64 of CRP_HUMAN (SEQ ID NO:316), which also corresponds to amino acids 1-64 of HSCREACT_PEA_{—}1_P28 (SEQ ID NO:322), and a second amino acid sequence being at least 70%, optionally at least 80%, preferably at least 85%, more preferably at least 90% and most preferably at least 95% homologous to a polypeptide having the sequence LLS corresponding to amino acids 65-67 of HSCREACT_PEA_{—}1_P28 (SEQ ID NO:322), wherein said first amino acid sequence and second amino acid sequence are contiguous and in a sequential order.

[0071] An isolated chimeric polypeptide encoding for HSSTROL3_PEA_{—}1_P4 (SEQ ID NO:364), comprising a first amino acid sequence being at least about 90% or preferably at least about 95% homologous to amino acids 1-163 of MMP11_HUMAN (SEQ ID NO:363), which also corresponds to amino acids 1-163 of HSSTROL3_PEA_{—}1_P4 (SEQ ID NO:364), a bridging amino acid H corresponding to amino acid 164 of HSSTROL3_PEA_{—}1_P4 (SEQ ID NO:364), a second amino acid sequence being at least about 90% or preferably at least about 95% homologous to amino acids 165-445 of MMP11_HUMAN (SEQ ID NO:363), which also corresponds to amino acids 165-445 of HSSTROL3_PEA_{—}1_P4 (SEQ ID NO:364), and a third amino acid sequence being at least 70%, optionally at least 80%, preferably at least 85%, more preferably at least 90% and most preferably at least 95% homologous to a polypeptide having the sequence ALGVRQLVGGGHSSRFSHLVVAGLPHACHRKSGSSSQVLCPEPSALLSVAG (SEQ ID NO: 652) corresponding to amino acids 446-496 of HSSTROL3_PEA_{—}1_P4 (SEQ ID NO:364), wherein said first amino acid sequence, bridging amino acid, second amino acid sequence and third amino acid sequence are contiguous and in a sequential order.

[0072] An isolated polypeptide encoding for a tail of HSSTROL3_PEA_{—}1_P4 (SEQ ID NO:364), comprising a polypeptide being at least 70%, optionally at least about 80%, preferably at least about 85%, more preferably at least about 90% and most preferably at least about 95% homologous to the sequence ALGVRQLVGGGHSSRFSHLVVAGLPHACHRKSGSSSQVLCPEPSALLSVAG (SEQ ID NO: 652) in HSSTROL3_PEA_{—}1_P4 (SEQ ID NO:364).

[0073] An isolated chimeric polypeptide encoding for HSSTROL3_PEA_{—}1_P5 (SEQ ID NO:365), comprising a first amino acid sequence being at least about 90% or preferably at least about 95% homologous amino acids 1-163 of MMP11_HUMAN (SEQ ID NO:363), which also corresponds to amino acids 1-163 of HSSTROL3_PEA_{—}1_P5 (SEQ ID NO:365), a bridging amino acid H corresponding to amino acid 164 of HSSTROL3_PEA_{—}1_P5 (SEQ ID NO:365), a second amino acid sequence being at least about 90% or preferably at least about 95% homologous to amino acids 165-358 of MMP11 HUMAN (SEQ ID NO:363), which also corresponds to amino acids 165-358 of HSSTROL3_PEA_{—}1_P5 (SEQ ID NO:365), and a third amino acid sequence being at least 70%, optionally at least 80%, preferably at least 85%, more preferably at least 90% and most preferably at least 95% homologous to a polypeptide having the sequence ELGFPSSTGRDESLEHCRCQGLHK (SEQ ID NO: 653) corresponding to amino acids 359-382 of HSSTROL3_PEA_{—}1_P5 (SEQ ID NO:365), wherein said first amino acid sequence, bridging amino acid, second amino acid sequence and third amino acid sequence are contiguous and in a sequential order.

[0074] An isolated polypeptide encoding for a tail of HSSTROL3_PEA_{—}1_P5 (SEQ ID NO:365), comprising a polypeptide being at least 70%, optionally at least about 80%, preferably at least about 85%, more preferably at least about 90% and most preferably at least about 95% homologous to the sequence ELGFPSSTGRDESLEHCRCQGLHK (SEQ ID NO: 653) in HSSTROL3_PEA_{—}1_P5 (SEQ ID NO:365). An isolated chimeric polypeptide encoding for HSSTROL3_PEA_{—}1_P7 (SEQ ID NO:366), comprising a first amino acid sequence being at least about 90% or preferably at least about 95% homologous to amino acids 1-163 of MMP11_HUMAN (SEQ ID NO:363), which also corresponds to amino acids 1-163 of HSSTROL3_PEA_{—}1_P7 (SEQ ID NO:366), a bridging amino acid H corresponding to amino acid 164 of HSSTROL3_PEA_{—}1_P7 (SEQ ID NO:366), a second amino acid sequence being at least about 90% or preferably at least about 95% homologous to amino acids 165-359 of MMP11_HUMAN (SEQ ID NO:363), which also corresponds to amino acids 165-359 of HSSTROL3_PEA_{—}1_P7 (SEQ ID NO:366), and a third amino acid sequence being at least 70%, optionally at least 80%, preferably at least 85%, more preferably at least 90% and most preferably at least 95% homologous to a polypeptide having the sequence TTGVSTPAPGV (SEQ ID NO: 654) corresponding to amino acids 360-370 of HSSTROL3_PEA_{—}1_P7 (SEQ ID NO:366), wherein said first amino acid sequence, bridging amino acid, second amino acid sequence and third amino acid sequence are contiguous and in a sequential order.

[0075] An isolated polypeptide encoding for a tail of HSSTROL3_PEA_{—}1_P7 (SEQ ID NO:366), comprising a polypeptide being at least 70%, optionally at least about 80%, preferably at least about 85%, more preferably at least about 90% and most preferably at least about 95% homologous to the sequence TTGVSTPAPGV (SEQ ID NO: 654) in HSSTROL3_PEA_{—}1_P7 (SEQ ID NO:366).

[0076] An isolated chimeric polypeptide encoding for HSSTROL3_PEA_{—}1_P8 (SEQ ID NO:367), comprising a first amino acid sequence being at least about 90% or preferably at least about 95% homologous to amino acids 1-163 of MMP11_HUMAN (SEQ ID NO:363), which also corresponds to amino acids 1-163 of HSSTROL3_PEA_{—}1_P8 (SEQ ID NO:367), a bridging amino acid H corresponding to amino acid 164 of HSSTROL3_PEA_{—}1_P8 (SEQ ID NO:367), a second amino acid sequence being at least about 90% or preferably at least about 95% homologous to amino acids 165-286 of MMP11_HUMAN (SEQ ID NO:363), which also corresponds to amino acids 165-286 of HSSTROL3_PEA_{—}1_P8 (SEQ ID NO:367), and a third amino acid sequence being at least 70%, optionally at least 80%, preferably at least 85%, more preferably at least 90% and most preferably at least 95% homologous to a polypeptide having the sequence VRPCLPVPLLLCWPL (SEQ ID NO: 655) corresponding to amino acids 287-301 of HSSTROL3_PEA_{—}1_P8 (SEQ ID NO:367), wherein said first amino acid sequence, bridging amino acid, second amino acid sequence and third amino acid sequence are contiguous and in a sequential order.

[0077] An isolated polypeptide encoding for a tail of HSSTROL3_PEA_{—}1_P8 (SEQ ID NO:367), comprising a polypeptide being at least 70%, optionally at least about 80%, preferably at least about 85%, more preferably at least about 90% and most preferably at least about 95% homologous to the sequence VRPCLPVPLLLCWPL (SEQ ID NO: 655) in HSSTROL3_PEA_{—}1_P8 (SEQ ID NO:367).

[0078] An isolated chimeric polypeptide encoding for HSSTROL3_PEA_{—}1_P9 (SEQ ID NO:368), comprising a first amino acid sequence being at least about 90% or preferably at least about 95% homologous to amino acids 1-96 of MMP11_HUMAN (SEQ ID NO:363), which also corresponds to amino acids 1-96 of HSSTROL3_PEA_{—}1_P9 (SEQ ID NO:368), a second amino acid sequence being at least about 90% or preferably at least about 95% homologous to amino acids 113-163 of MMP11_HUMAN (SEQ ID NO:363), which also corresponds to amino acids 97-147 of HSSTROL3_PEA_{—}1_P9 (SEQ ID NO:368), a bridging amino acid H corresponding to amino acid 148 of HSSTROL3_PEA_{—}1_P9 (SEQ ID NO:368), a third amino acid sequence being at least about 90% or preferably at least about 95% homologous to amino acids 165-359 of MMP11_HUMAN (SEQ ID NO:363), which also corresponds to amino acids 149-343 of HSSTROL3_PEA_{—}1_P9 (SEQ ID NO:368), and a fourth amino acid sequence being at least 70%, optionally at least 80%, preferably at least 85%, more preferably at least 90% and most preferably at least 95% homologous to a polypeptide having the sequence TTGVSTPAPGV (SEQ ID NO: 654) corresponding to amino acids 344-354 of HSSTROL3_PEA_{—}1_P9 (SEQ ID NO:368), wherein said first amino acid sequence, second amino acid sequence, bridging amino acid, third amino acid sequence and fourth amino acid sequence are contiguous and in a sequential order.

[0079] An isolated chimeric polypeptide encoding for an edge portion of HSSTROL3_PEA_{—}1_P9 (SEQ ID NO:368), comprising a polypeptide having a length “n”, wherein n is at least about 10 amino acids in length, optionally at least about 20 amino acids in length, preferably at least about 30 amino acids in length, more preferably at least about 40 amino acids in length and most preferably at least about 50 amino acids in length, wherein at least two amino acids comprise KR, having a structure as follows: a sequence starting from any of amino acid numbers 96−x to 96; and ending at any of amino acid numbers 97+((n−2)−x), in which x varies from 0 to n−2.

[0080] An isolated polypeptide encoding for a tail of HSSTROL3_PEA_{—}1_P9 (SEQ ID NO:368), comprising a polypeptide being at least 70%, optionally at least about 80%, preferably at least about 85%, more preferably at least about 90% and most preferably at least about 95% homologous to the sequence TTGVSTPAPGV (SEQ ID NO: 654) in HSSTROL3_PEA_{—}1_P9 (SEQ ID NO:368).

[0081] An isolated chimeric polypeptide encoding for HSSTROL3_PEA_{—}1_P11 (SEQ ID NO:369), comprising a first amino acid sequence being at least about 90% or preferably at least about 95% homologous to amino acids 1-113 of MMP11_HUMAN (SEQ ID NO:363), which also corresponds to amino acids 1-113 of HSSTROL3_PEA_{—}1_P11 (SEQ ID NO:369).

[0082] An isolated chimeric polypeptide encoding for HUMGRP5E_P2 (SEQ ID NO:401), comprising a first amino acid sequence being at least about 90% or preferably at least about 95% homologous to amino acids 1-121 of GRP_HUMAN (SEQ ID NO:400), which also corresponds to amino acids 1-121 of HUMGRP5E_P2 (SEQ ID NO:401), and a second amino acid sequence being at least 70%, optionally at least 80%, preferably at least 85%, more preferably at least 90% and most preferably at least 95% homologous to a polypeptide having the sequence LVDSLLQVLNVKEGTPS (SEQ ID NO: 657) corresponding to amino acids 122-138 of HUMGRP5E_P2 (SEQ ID NO:401), wherein said first amino acid sequence and second amino acid sequence are contiguous and in a sequential order.

[0083] An isolated polypeptide encoding for a tail of HUMGRP5E_P2 (SEQ ID NO:401), comprising a polypeptide being at least 70%, optionally at least about 80%, preferably at least about 85%, more preferably at least about 90% and most preferably at least about 95% homologous to the sequence LVDSLLQVLNVKEGTPS (SEQ ID NO: 657) in HUMGRP5E_P2 (SEQ ID NO:401).

[0084] An isolated chimeric polypeptide encoding for HUMGRP5E_P3 (SEQ ID NO:402), comprising a first amino acid sequence being at least about 90% or preferably at least about 95% homologous to amino acids 1-121 of GRP_HUMAN (SEQ ID NO:400), which also corresponds to amino acids 1-121 of HUMGRP5E_P3 (SEQ ID NO:402), and a second amino acid sequence being at least 70%, optionally at least 80%, preferably at least 85%, more preferably at least 90% and most preferably at least 95% homologous to a polypeptide having the sequence TLCSRFST (SEQ ID NO: 658) corresponding to amino acids 122-129 of HUMGRP5E_P3 (SEQ ID NO:402), wherein said first amino acid sequence and second amino acid sequence are contiguous and in a sequential order.

[0085] An isolated polypeptide encoding for a tail of HUMGRP5E_P3 (SEQ ID NO:402), comprising a polypeptide being at least 70%, optionally at least about 80%, preferably at least about 85%, more preferably at least about 90% and most preferably at least about 95% homologous to the sequence TLCSRFST (SEQ ID NO: 658) in HUMGRP5E_P3 (SEQ ID NO:402).

[0086] An isolated chimeric polypeptide encoding for HUMGRP5E_P4 (SEQ ID NO:403), comprising a first amino acid sequence being at least about 90% or preferably at least about 95% homologous to amino acids 1-127 of GRP_HUMAN (SEQ ID NO:400), which also corresponds to amino acids 1-127 of HUMGRP5E_P4 (SEQ ID NO:403), and a second amino acid sequence being at least about 90% or preferably at least about 95% homologous to amino acids 135-148 of GRP_HUMAN (SEQ ID NO:400), which also corresponds to amino acids 128-141 of HUMGRP5E_P4 (SEQ ID NO:403), wherein said first amino acid sequence and second amino acid sequence are contiguous and in a sequential order.

[0087] An isolated chimeric polypeptide encoding for an edge portion of HUMGRP5E_P4 (SEQ ID NO:403), comprising a polypeptide having a length “n”, wherein n is at least about 10 amino acids in length, optionally at least about 20 amino acids in length, preferably at least about 30 amino acids in length, more preferably at least about 40 amino acids in length and most preferably at least about 50 amino acids in length, wherein at least two amino acids comprise KG, having a structure as follows: a sequence starting from any of amino acid numbers 127−x to 127; and ending at any of amino acid numbers 128+((n−2)−x), in which x varies from 0 to n−2.

[0088] An isolated chimeric polypeptide encoding for HUMGRP5E_P5 (SEQ ID NO:404), comprising a first amino acid sequence being at least about 90% or preferably at least about 95% homologous to amino acids 1-127 of GRP_HUMAN (SEQ ID NO:400), which also corresponds to amino acids 1-127 of HUMGRP5E_P5 (SEQ ID NO:404), and a second amino acid sequence being at least 70%, optionally at least 80%, preferably at least 85%, more preferably at least 90% and most preferably at least 95% homologous to a polypeptide having the sequence DSLLQVLNVKEGTPS (SEQ ID NO: 659) corresponding to amino acids 128-142 of HUMGRP5E_P5 (SEQ ID NO:404), wherein said first amino acid sequence and second amino acid sequence are contiguous and in a sequential order.

[0089] An isolated polypeptide encoding for a tail of HUMGRP5E_P5 (SEQ ID NO:404), comprising a polypeptide being at least 70%, optionally at least about 80%, preferably at least about 85%, more preferably at least about 90% and most preferably at least about 95% homologous to the sequence DSLLQVLNVKEGTPS (SEQ ID NO: 659) in HUMGRP5E_P5 (SEQ ID NO:404).

[0090] An isolated chimeric polypeptide encoding for T94936_PEA_{—}1_PEA_{—}1_P2 (SEQ ID NO:427), comprising a first amino acid sequence being at least about 90% or preferably at least about 95% homologous to amino acids 1-150 of Q8TD06 (SEQ ID NO:695) (SEQ ID NO:426), which also corresponds to amino acids 1-150 of T94936_PEA_{—}1_PEA_{—}1_P2 (SEQ ID NO:427).

[0091] An isolated chimeric polypeptide encoding for T94936_PEA_{—}1_PEA_{—}1_P3 (SEQ ID NO:428), comprising a first amino acid sequence being at least about 90% or preferably at least about 95% homologous to amino acids 1-122 of Q8TD06 (SEQ ID NO:695) (SEQ ID NO:426), which also corresponds to amino acids 1-122 of T94936_PEA_{—}1_PEA_{—}1_P3 (SEQ ID NO:428), and a second amino acid sequence being at least 70%, optionally at least 80%, preferably at least 85%, more preferably at least 90% and most preferably at least 95% homologous to a polypeptide having the sequence GMYVISFHQIYKISRNQHSCFYF (SEQ ID NO: 660) corresponding to amino acids 123-145 of T94936_PEA_{—}1_PEA_{—}1_P3 (SEQ ID NO:428), wherein said first amino acid sequence and second amino acid sequence are contiguous and in a sequential order.

[0092] An isolated polypeptide encoding for a tail of T94936_PEA_{—}1_PEA_{—}1_P3 (SEQ ID NO:428), comprising a polypeptide being at least 70%, optionally at least about 80%, preferably at least about 85%, more preferably at least about 90% and most preferably at least about 95% homologous to the sequence GMYVISFHQIYKISRNQHSCFYF (SEQ ID NO: 660) in T94936_PEA_{—}1_PEA_{—}1_P3 (SEQ ID NO:428).

[0093] An isolated chimeric polypeptide encoding for T94936_PEA_{—}1_PEA_{—}1_P7 (SEQ ID NO:429), comprising a first amino acid sequence being at least about 90% or preferably at least about 95% homologous to amino acids 1-57 of Q8TD06 (SEQ ID NO:695) (SEQ ID NO:426), which also corresponds to amino acids 1-57 of T94936_PEA_{—}1_PEA_{—}1_P7 (SEQ ID NO:429), and a second amino acid sequence being at least 70%, optionally at least 80%, preferably at least 85%, more preferably at least 90% and most preferably at least 95% homologous to a polypeptide having the sequence RSH corresponding to amino acids 58-60 of T94936_PEA_{—}1_PEA_{—}1_P7 (SEQ ID NO:429), wherein said first amino acid sequence and second amino acid sequence are contiguous and in a sequential order.

[0094] An isolated chimeric polypeptide encoding for HSTGFB1_P2 (SEQ ID NO:464), comprising a first amino acid sequence being at least about 90% or preferably at least about 95% homologous to amino acids 1-238 of TGFB1_HUMAN (SEQ ID NO:463), which also corresponds to amino acids 1-238 of HSTGFB1_P2 (SEQ ID NO:464), and a second amino acid sequence being at least 70%, optionally at least 80%, preferably at least 85%, more preferably at least 90% and most preferably at least 95% homologous to a polypeptide having the sequence EACFPGHAQL (SEQ ID NO: 661) corresponding to amino acids 239-248 of HSTGFB1_P2 (SEQ ID NO:464), wherein said first amino acid sequence and second amino acid sequence are contiguous and in a sequential order.

[0095] An isolated polypeptide encoding for a tail of HSTGFB1_P2 (SEQ ID NO:464), comprising a polypeptide being at least 70%, optionally at least about 80%, preferably at least about 85%, more preferably at least about 90% and most preferably at least about 95% homologous to the sequence EACFPGHAQL (SEQ ID NO: 661) in HSTGFB1_P2 (SEQ ID NO:464).

[0096] An isolated chimeric polypeptide encoding for HSTGFB1_P3 (SEQ ID NO:465), comprising a first amino acid sequence being at least about 90% or preferably at least about 95% homologous to amino acids 1-339 of TGFB1_HUMAN (SEQ ID NO:463), which also corresponds to amino acids 1-339 of HSTGFB1_P3 (SEQ ID NO:465), and a second amino acid sequence being at least 70%, optionally at least 80%, preferably at least 85%, more preferably at least 90% and most preferably at least 95% homologous to a polypeptide having the sequence RLAHRATRCAWGEPGRRKRREKEK (SEQ ID NO: 662) corresponding to amino acids 340-363 of HSTGFB1_P3 (SEQ ID NO:465), wherein said first amino acid sequence and second amino acid sequence are contiguous and in a sequential order.

[0097] An isolated polypeptide encoding for a tail of HSTGFB1_P3 (SEQ ID NO:465), comprising a polypeptide being at least 70%, optionally at least about 80%, preferably at least about 85%, more preferably at least about 90% and most preferably at least about 95% homologous to the sequence RLAHRATRCAWGEPGRRKRREKEK (SEQ ID NO: 662) in HSTGFB1_P3 (SEQ ID NO:465).

[0098] An isolated chimeric polypeptide encoding for HSTGFB1_P5 (SEQ ID NO:466), comprising a first amino acid sequence being at least about 90% or preferably at least about 95% homologous to amino acids 1-338 of TGFB1_HUMAN (SEQ ID NO:463), which also corresponds to amino acids 1-338 of HSTGFB1_P5 (SEQ ID NO:466), and a second amino acid sequence being at least 70%, optionally at least 80%, preferably at least 85%, more preferably at least 90% and most preferably at least 95% homologous to a polypeptide having the sequence LNEQNLIQEVPNIWQREVG (SEQ ID NO: 663) corresponding to amino acids 339-357 of HSTGFB1_P5 (SEQ ID NO:466), wherein said first amino acid sequence and second amino acid sequence are contiguous and in a sequential order.

[0099] An isolated polypeptide encoding for a tail of HSTGFB1_P5 (SEQ ID NO:466), comprising a polypeptide being at least 70%, optionally at least about 80%, preferably at least about 85%, more preferably at least about 90% and most preferably at least about 95% homologous to the sequence LNEQNLIQEVPNIWQREVG (SEQ ID NO: 663) in HSTGFB1_P5 (SEQ ID NO:466).

[0100] An isolated chimeric polypeptide encoding for HSTGFB1_P7 (SEQ ID NO:467), comprising a first amino acid sequence being at least about 90% or preferably at least about 95% homologous to amino acids 1-237 of TGFB1_HUMAN (SEQ ID NO:463), which also corresponds to amino acids 1-237 of HSTGFB1_P7 (SEQ ID NO:467), and a second amino acid sequence being at least 70%, optionally at least 80%, preferably at least 85%, more preferably at least 90% and most preferably at least 95% homologous to a polypeptide having the sequence APRRRTAACGSCTLTSARTSAGSGSTSPRATMPTSASGPAPTFGAWTRSTARSWPCTTSITRAPRRR RAACRRRWSRCPSCTTWAASPRWASSCPT (SEQ ID NO: 664) corresponding to amino acids 238-332 of HSTGFB1_P7 (SEQ ID NO:467), wherein said first amino acid sequence and second amino acid sequence are contiguous and in a sequential order.

[0101] An isolated polypeptide encoding for a tail of HSTGFB1_P7 (SEQ ID NO:467), comprising a polypeptide being at least 70%, optionally at least about 80%, preferably at least about 85%, more preferably at least about 90% and most preferably at least about 95% homologous to the sequence APRRRTAACGSCTLTSARTSAGSGSTSPRATMPTSASGPAPTFGAWTRSTARSWPCTTSITRAPRRR RAACRRRWSRCPSCTTWAASPRWASSCPT (SEQ ID NO: 664) in HSTGFB1_P7 (SEQ ID NO:467).

[0102] An isolated chimeric polypeptide encoding for Z36249_PEA_{—}3_P2 (SEQ ID NO:579), comprising a first amino acid sequence being at least about 90% or preferably at least about 95% homologous to amino acids 1-115 of Q96LE7, which also corresponds to amino acids 1-115 of Z36249_PEA_{—}3_P2 (SEQ ID NO:579), and a second amino acid sequence being at least about 90% or preferably at least about 95% homologous to amino acids 152-319 of Q96LE7, which also corresponds to amino acids 116-283 of Z36249_PEA_{—}3_P2 (SEQ ID NO:579), wherein said first amino acid sequence and second amino acid sequence are contiguous and in a sequential order.

[0103] An isolated chimeric polypeptide encoding for an edge portion of Z36249_PEA_{—}3_P2 (SEQ ID NO:579), comprising a polypeptide having a length “n”, wherein n is at least about 10 amino acids in length, optionally at least about 20 amino acids in length, preferably at least about 30 amino acids in length, more preferably at least about 40 amino acids in length and most preferably at least about 50 amino acids in length, wherein at least two amino acids comprise IY, having a structure as follows: a sequence starting from any of amino acid numbers 115−x to 115; and ending at any of amino acid numbers 116+((n−2)−x), in which x varies from 0 to n−2.

[0104] An isolated chimeric polypeptide encoding for Z36249_PEA_{—}3_P2 (SEQ ID NO:579), comprising a first amino acid sequence being at least about 90% or preferably at least about 95% homologous to amino acids 1-70 of Q15327, which also corresponds to amino acids 1-70 of Z36249_PEA_{—}3_P2 (SEQ ID NO:579), a bridging amino acid K corresponding to amino acid 71 of Z36249_PEA_{—}3_P2 (SEQ ID NO:579), a second amino acid sequence being at least about 90% or preferably at least about 95% homologous to amino acids 72-115 of Q15327, which also corresponds to amino acids 72-115 of Z36249_PEA_{—}3_P2 (SEQ ID NO:579), and a third amino acid sequence being at least about 90% or preferably at least about 95% homologous to amino acids 152-319 of Q15327, which also corresponds to amino acids 116-283 of Z36249_PEA_{—}3_P2 (SEQ ID NO:579), wherein said first amino acid sequence, bridging amino acid, second amino acid sequence and third amino acid sequence are contiguous and in a sequential order.

[0105] An isolated chimeric polypeptide encoding for an edge portion of Z36249_PEA_{—}3_P2 (SEQ ID NO:579), comprising a polypeptide having a length “n”, wherein n is at least about 10 amino acids in length, optionally at least about 20 amino acids in length, preferably at least about 30 amino acids in length, more preferably at least about 40 amino acids in length and most preferably at least about 50 amino acids in length, wherein at least two amino acids comprise IY, having a structure as follows: a sequence starting from any of amino acid numbers 115−x to 115; and ending at any of amino acid numbers 116+((n−2)−x), in which x varies from 0 to n−2.

[0106] An isolated chimeric polypeptide encoding for Z36249_PEA_{—}3_P3 (SEQ ID NO:580), comprising a first amino acid sequence being at least about 90% or preferably at least about 95% homologous to amino acids 1-184 of Q96LE7, which also corresponds to amino acids 1-184 of Z36249_PEA_{—}3_P3 (SEQ ID NO:580), and a second amino acid sequence being at least 70%, optionally at least 80%, preferably at least 85%, more preferably at least 90% and most preferably at least 95% homologous to a polypeptide having the sequence VNIFLCLGMSQKK (SEQ ID NO: 665) corresponding to amino acids 185-197 of Z36249_PEA_{—}3_P3 (SEQ ID NO:580), wherein said first amino acid sequence and second amino acid sequence are contiguous and in a sequential order.

[0107] An isolated polypeptide encoding for a tail of Z36249_PEA_{—}3_P3 (SEQ ID NO:580), comprising a polypeptide being at least 70%, optionally at least about 80%, preferably at least about 85%, more preferably at least about 90% and most preferably at least about 95% homologous to the sequence VNIFLCLGMSQKK (SEQ ID NO: 665) in Z36249_PEA_{—}3_P3 (SEQ ID NO:580).

[0108] An isolated chimeric polypeptide encoding for Z36249_PEA_{—}3_P3 (SEQ ID NO:580), comprising a first amino acid sequence being at least about 90% or preferably at least about 95% homologous to amino acids 1-70 of Q15327, which also corresponds to amino acids 1-70 of Z36249_PEA_{—}3_P3 (SEQ ID NO:580), a bridging amino acid K corresponding to amino acid 71 of Z36249_PEA_{—}3_P3 (SEQ ID NO:580), a second amino acid sequence being at least about 90% or preferably at least about 95% homologous to amino acids 72-184 of Q15327, which also corresponds to amino acids 72-184 of Z36249_PEA_{—}3_P3 (SEQ ID NO:580), and a third amino acid sequence being at least 70%, optionally at least 80%, preferably at least 85%, more preferably at least 90% and most preferably at least 95% homologous to a polypeptide having the sequence VNIFLCLGMSQKK (SEQ ID NO: 665) corresponding to amino acids 185-197 of Z36249_PEA_{—}3_P3 (SEQ ID NO:580), wherein said first amino acid sequence, bridging amino acid, second amino acid sequence and third amino acid sequence are contiguous and in a sequential order.

[0109] An isolated polypeptide encoding for a tail of Z36249_PEA_{—}3_P3 (SEQ ID NO:580), comprising a polypeptide being at least 70%, optionally at least about 80%, preferably at least about 85%, more preferably at least about 90% and most preferably at least about 95% homologous to the sequence VNIFLCLGMSQKK (SEQ ID NO: 665) in Z36249_PEA_{—}3_P3 (SEQ ID NO:580).

[0110] An isolated chimeric polypeptide encoding for Z36249_PEA_{—}3_P4 (SEQ ID NO:581), comprising a first amino acid sequence being at least about 90% or preferably at least about 95% homologous to amino acids 1-151 of Q96LE7, which also corresponds to amino acids 1-151 of Z36249_PEA_{—}3_P4 (SEQ ID NO:581), and a second amino acid sequence being at least 70%, optionally at least 80%, preferably at least 85%, more preferably at least 90% and most preferably at least 95% homologous to a polypeptide having the sequence VRLMQSTAKSSSLILCFLCFTPVLLI (SEQ ID NO: 666) corresponding to amino acids 152-177 of Z36249_PEA_{—}3_P4 (SEQ ID NO:581), wherein said first amino acid sequence and second amino acid sequence are contiguous and in a sequential order.

[0111] An isolated polypeptide encoding for a tail of Z36249_PEA_{—}3_P4 (SEQ ID NO:581), comprising a polypeptide being at least 70%, optionally at least about 80%, preferably at least about 85%, more preferably at least about 90% and most preferably at least about 95% homologous to the sequence VRLMQSTAKSSSLILCFLCFTPVLLI (SEQ ID NO: 666) in Z36249_PEA_{—}3_P4 (SEQ ID NO:581).

[0112] An isolated chimeric polypeptide encoding for Z36249_PEA_{—}3_P4 (SEQ ID NO:581), comprising a first amino acid sequence being at least about 90% or preferably at least about 95% homologous to amino acids 1-70 of Q15327, which also corresponds to amino acids 1-70 of Z36249_PEA_{—}3_P4 (SEQ ID NO:581), a bridging amino acid K corresponding to amino acid 71 of Z36249_PEA_{—}3_P4 (SEQ ID NO:581), a second amino acid sequence being at least about 90% or preferably at least about 95% homologous to amino acids 72-151 of Q15327, which also corresponds to amino acids 72-151 of Z36249_PEA_{—}3_P4 (SEQ ID NO: 581), and a third amino acid sequence being at least 70%, optionally at least 80%, preferably at least 85%, more preferably at least 90% and most preferably at least 95% homologous to a polypeptide having the sequence VRLMQSTAKSSSLILCFLCFTPVLLI (SEQ ID NO: 666) corresponding to amino acids 152-177 of Z36249_PEA_{—}3_P4 (SEQ ID NO:581), wherein said first amino acid sequence, bridging amino acid, second amino acid sequence and third amino acid sequence are contiguous and in a sequential order.

[0113] An isolated polypeptide encoding for a tail of Z36249_PEA_{—}3_P4 (SEQ ID NO: 581), comprising a polypeptide being at least 70%, optionally at least about 80%, preferably at least about 85%, more preferably at least about 90% and most preferably at least about 95% homologous to the sequence VRLMQSTAKSSSLILCFLCFTPVLLI (SEQ ID NO: 666) in Z36249_PEA_{—}3_P4 (SEQ ID NO:581).

[0114] An isolated chimeric polypeptide encoding for Z36249_PEA_{—}3_P5 (SEQ ID NO:582), comprising a first amino acid sequence being at least about 90% or preferably at least about 95% homologous to amino acids 1-151 of Q96LE7, which also corresponds to amino acids 1-151 of Z36249_PEA_{—}3_P5 (SEQ ID NO:582), and a second amino acid sequence being at least about 90% or preferably at least about 95% homologous to amino acids 185-319 of Q96LE7, which also corresponds to amino acids 152-286 of Z36249_PEA_{—}3_P5 (SEQ ID NO:582), wherein said first amino acid sequence and second amino acid sequence are contiguous and in a sequential order.

[0115] An isolated chimeric polypeptide encoding for an edge portion of Z36249_PEA_{—}3_P5 (SEQ ID NO:582), comprising a polypeptide having a length “n”, wherein n is at least about 10 amino acids in length, optionally at least about 20 amino acids in length, preferably at least about 30 amino acids in length, more preferably at least about 40 amino acids in length and most preferably at least about 50 amino acids in length, wherein at least two amino acids comprise EL, having a structure as follows: a sequence starting from any of amino acid numbers 151−x to 151; and ending at any of amino acid numbers 152+((n−2)−x), in which x varies from 0 to n−2.

[0116] An isolated chimeric polypeptide encoding for Z36249_PEA_{—}3_P5 (SEQ ID NO:582), comprising a first amino acid sequence being at least about 90% or preferably at least about 95% homologous to amino acids 1-70 of Q15327, which also corresponds to amino acids 1-70 of Z36249_PEA_{—}3_P5 (SEQ ID NO:582), a bridging amino acid K corresponding to amino acid 71 of Z36249_PEA_{—}3_P5 (SEQ ID NO:582), a second amino acid sequence being at least about 90% or preferably at least about 95% homologous to amino acids 72-151 of Q15327, which also corresponds to amino acids 72-151 of Z36249_PEA_{—}3_P5 (SEQ ID NO:582), and a third amino acid sequence being at least about 90% or preferably at least about 95% homologous to amino acids 185-319 of Q15327, which also corresponds to amino acids 152-286 of Z36249_PEA_{—}3_P5 (SEQ ID NO:582), wherein said first amino acid sequence, bridging amino acid, second amino acid sequence and third amino acid sequence are contiguous and in a sequential order.

[0117] An isolated chimeric polypeptide encoding for an edge portion of Z36249_PEA_{—}3_P5 (SEQ ID NO:582), comprising a polypeptide having a length “n”, wherein n is at least about 10 amino acids in length, optionally at least about 20 amino acids in length, preferably at least about 30 amino acids in length, more preferably at least about 40 amino acids in length and most preferably at least about 50 amino acids in length, wherein at least two amino acids comprise EL, having a structure as follows: a sequence starting from any of amino acid numbers 151−x to 151; and ending at any of amino acid numbers 152+((n−2)−x), in which x varies from 0 to n−2.

[0118] An isolated chimeric polypeptide encoding for M78530_PEA_{—}1_P15 (SEQ ID NO:619), comprising a first amino acid sequence being at least about 90% or preferably at least about 95% homologous to amino acids 1-544 of Q9HCB6 (SEQ ID NO:617), which also corresponds to amino acids 1-544 of M78530_PEA_{—}1_P15 (SEQ ID NO:619), a bridging amino acid T corresponding to amino acid 545 of M78530_PEA_{—}1_P15 (SEQ ID NO:619), a second amino acid sequence being at least about 90% or preferably at least about 95% homologous to amino acids 546-665 of Q9HCB6 (SEQ ID NO:617), which also corresponds to amino acids 546-665 of M78530_PEA_{—}1_P15 (SEQ ID NO:619), and a third amino acid sequence being at least 70%, optionally at least 80%, preferably at least 85%, more preferably at least 90% and most preferably at least 95% homologous to a polypeptide having the sequence RKSWSSSRPITSMFLSPGSPEPASANTARS (SEQ ID NO: 667) corresponding to amino acids 666-695 of M78530_PEA_{—}1_P15 (SEQ ID NO:619), wherein said first amino acid sequence, bridging amino acid, second amino acid sequence and third amino acid sequence are contiguous and in a sequential order.

[0119] An isolated polypeptide encoding for a tail of M78530_PEA_{—}1_P15 (SEQ ID NO:619), comprising a polypeptide being at least 70%, optionally at least about 80%, preferably at least about 85%, more preferably at least about 90% and most preferably at least about 95% homologous to the sequence RKSWSSSRPITSMFLSPGSPEPASANTARS (SEQ ID NO: 667) in M78530_PEA_{—}1_P15 (SEQ ID NO:619).

[0120] An isolated chimeric polypeptide encoding for M78530_PEA_{—}1_P15 (SEQ ID NO:619), comprising a first amino acid sequence being at least 70%, optionally at least 80%, preferably at least 85%, more preferably at least 90% and most preferably at least 95% homologous to a polypeptide having the sequence MRLSPAPLKLSRTPALLALALPLAAALAFSDETLDKVPKSEGYCSRILRAQGTRREGYTEFSLRVEG DPDFYKPGTSYRVTLS (SEQ ID NO: 668) corresponding to amino acids 1-83 of M78530_PEA_{—}1_P15 (SEQ ID NO:619), a second amino acid sequence being at least about 90% or preferably at least about 95% homologous to amino acids 1-582 of O94862 (SEQ ID NO:618), which also corresponds to amino acids 84-665 of M78530_PEA_{—}1_P15 (SEQ ID NO:619), and a third amino acid sequence being at least 70%, optionally at least 80%, preferably at least 85%, more preferably at least 90% and most preferably at least 95% homologous to a polypeptide having the sequence RKSWSSSRPITSMFLSPGSPEPASANTARS (SEQ ID NO: 667) corresponding to amino acids 666-695 of M78530_PEA_{—}1_P15 (SEQ ID NO:619), wherein said first amino acid sequence, second amino acid sequence and third amino acid sequence are contiguous and in a sequential order.

[0121] An isolated polypeptide encoding for a head of M78530_PEA_{—}1_P15 (SEQ ID NO:619), comprising a polypeptide being at least 70%, optionally at least about 80%, preferably at least about 85%, more preferably at least about 90% and most preferably at least about 95% homologous to the sequence MRLSPAPLKLSRTPALLALALPLAAALAFSDETLDKVPKSEGYCSRILRAQGTRREGYTEFSLRVEG DPDFYKPGTSYRVTLS (SEQ ID NO: 668) of M78530_PEA_{—}1_P15 (SEQ ID NO:619).

[0122] An isolated polypeptide encoding for a tail of M78530_PEA_{—}1_P15 (SEQ ID NO:619), comprising a polypeptide being at least 70%, optionally at least about 80%, preferably at least about 85%, more preferably at least about 90% and most preferably at least about 95% homologous to the sequence RKSWSSSRPITSMFLSPGSPEPASANTARS (SEQ ID NO: 667) in M78530_PEA_{—}1_P15 (SEQ ID NO:619).

[0123] An isolated chimeric polypeptide encoding for M78530_PEA_{—}1_P16 (SEQ ID NO:620), comprising a first amino acid sequence being at least about 90% or preferably at least about 95% homologous to amino acids 1-297 of Q8NCD7 (SEQ ID NO:616), which also corresponds to amino acids 1-297 of M78530_PEA_{—}1_P16 (SEQ ID NO:620).

[0124] An isolated chimeric polypeptide encoding for M78530_PEA_{—}1_P16 (SEQ ID NO:620), comprising a first amino acid sequence being at least about 90% or preferably at least about 95% homologous to amino acids 1-297 of Q9HCB6 (SEQ ID NO:617), which also corresponds to amino acids 1-297 of M78530_PEA_{—}1_P16 (SEQ ID NO:620).

[0125] An isolated chimeric polypeptide encoding for M78530_PEA_{—}1_P16 (SEQ ID NO:620), comprising a first amino acid sequence being at least 70%, optionally at least 80%, preferably at least 85%, more preferably at least 90% and most preferably at least 95% homologous to a polypeptide having the sequence MRLSPAPLKLSRTPALLALALPLAAALAFSDETLDKVPKSEGYCSRILRAQGTRREGYTEFSLRVEG DPDFYKPGTSYRVTLS (SEQ ID NO: 668) corresponding to amino acids 1-83 of M78530_PEA_{—}1_P16 (SEQ ID NO:620), and a second amino acid sequence being at least about 90% or preferably at least about 95% homologous to amino acids 1-214 of O94862 (SEQ ID NO:618), which also corresponds to amino acids 84-297 of M78530_PEA_{—}1_P16 (SEQ ID NO:620), wherein said first amino acid sequence and second amino acid sequence are contiguous and in a sequential order.

[0126] An isolated polypeptide encoding for a head of M78530_PEA_{—}1_P16 (SEQ ID NO:620), comprising a polypeptide being at least 70%, optionally at least about 80%, preferably at least about 85%, more preferably at least about 90% and most preferably at least about 95% homologous to the sequence MRLSPAPLKLSRTPALLALALPLAAALAFSDETLDKVPKSEGYCSRILRAQGTRREGYTEFSLRVEG DPDFYKPGTSYRVTLS (SEQ ID NO: 668) of M78530_PEA_{—}1_P16 (SEQ ID NO:620).

[0127] An isolated chimeric polypeptide encoding for M78530_PEA_{—}1_P17 (SEQ ID NO:621), comprising a first amino acid sequence being at least about 90% or preferably at least about 95% homologous to amino acids 1-275 of Q8NCD7 (SEQ ID NO:616), which also corresponds to amino acids 1-275 of M78530_PEA_{—}1_P17 (SEQ ID NO:621), and a second amino acid sequence being at least 70%, optionally at least 80%, preferably at least 85%, more preferably at least 90% and most preferably at least 95% homologous to a polypeptide having the sequence VRQKNHRMTK (SEQ ID NO: 670) corresponding to amino acids 276-285 of M78530_PEA_{—}1_P17 (SEQ ID NO:621), wherein said first amino acid sequence and second amino acid sequence are contiguous and in a sequential order.

[0128] An isolated polypeptide encoding for a tail of M78530_PEA_{—}1_P17 (SEQ ID NO:621), comprising a polypeptide being at least 70%, optionally at least about 80%, preferably at least about 85%, more preferably at least about 90% and most preferably at least about 95% homologous to the sequence VRQKNHRMTK (SEQ ID NO: 670) in M78530_PEA_{—}1_P17 (SEQ ID NO:621).

[0129] An isolated chimeric polypeptide encoding for M78530_PEA_{—}1_P17 (SEQ ID NO:621), comprising a first amino acid sequence being at least about 90% or preferably at least about 95% homologous to amino acids 1-275 of Q9HCB6 (SEQ ID NO:617), which also corresponds to amino acids 1-275 of M78530_PEA_{—}1_P17 (SEQ ID NO:621), and a second amino acid sequence being at least 70%, optionally at least 80%, preferably at least 85%, more preferably at least 90% and most preferably at least 95% homologous to a polypeptide having the sequence VRQKNHRMTK (SEQ ID NO: 670) corresponding to amino acids 276-285 of M78530 PEA_{—}1_P17 (SEQ ID NO:621), wherein said first amino acid sequence and second amino acid sequence are contiguous and in a sequential order.

[0130] An isolated polypeptide encoding for a tail of M78530_PEA_{—}1_P17 (SEQ ID NO:621), comprising a polypeptide being at least 70%, optionally at least about 80%, preferably at least about 85%, more preferably at least about 90% and most preferably at least about 95% homologous to the sequence VRQKNHRMTK (SEQ ID NO: 670) in M78530_PEA_{—}1_P17 (SEQ ID NO:621).

[0131] An isolated chimeric polypeptide encoding for M78530_PEA_{—}1_P17 (SEQ ID NO:621), comprising a first amino acid sequence being at least 70%, optionally at least 80%, preferably at least 85%, more preferably at least 90% and most preferably at least 95% homologous to a polypeptide having the sequence MRLSPAPLKLSRTPALLALALPLAAALAFSDETLDKVPKSEGYCSRILRAQGTRREGYTEFSLRVEG DPDFYKPGTSYRVTLS (SEQ ID NO: 668) corresponding to amino acids 1-83 of M78530_PEA_{—}1_P17 (SEQ ID NO:621), a second amino acid sequence being at least about 90% or preferably at least about 95% homologous to amino acids 1-192 of O94862 (SEQ ID NO:618), which also corresponds to amino acids 84-275 of M78530_PEA_{—}1_P17 (SEQ ID NO:621), and a third amino acid sequence being at least 70%, optionally at least 80%, preferably at least 85%, more preferably at least 90% and most preferably at least 95% homologous to a polypeptide having the sequence VRQKNHRMTK (SEQ ID NO: 670) corresponding to amino acids 276-285 of M78530_PEA_{—}1_P17 (SEQ ID NO:621), wherein said first amino acid sequence, second amino acid sequence and third amino acid sequence are contiguous and in a sequential order.

[0132] An isolated polypeptide encoding for a head of M78530_PEA_{—}1_P17 (SEQ ID NO:621), comprising a polypeptide being at least 70%, optionally at least about 80%, preferably at least about 85%, more preferably at least about 90% and most preferably at least about 95% homologous to the sequence MRLSPAPLKLSRTPALLALALPLAAALAFSDETLDKVPKSEGYCSRILRAQGTRREGYTEFSLRVEG DPDFYKPGTSYRVTLS (SEQ ID NO: 668) of M78530_PEA_{—}1_P17 (SEQ ID NO:621).

[0133] An isolated polypeptide encoding for a tail of M78530_PEA_{—}1_P17 (SEQ ID NO:621), comprising a polypeptide being at least 70%, optionally at least about 80%, preferably at least about 85%, more preferably at least about 90% and most preferably at least about 95% homologous to the sequence VRQKNHRMTK (SEQ ID NO: 670) in M78530_PEA_{—}1_P17 (SEQ ID NO:621).

[0134] An isolated chimeric polypeptide encoding for S57296_{—}1_P59 (SEQ ID NO:542), comprising a first amino acid sequence being at least 90% homologous or preferably at least about 95% to amino acids 1-383 of ERB2_HUMAN (SEQ ID NO:538), which also corresponds to amino acids 1-383 of S57296_{—}1_P59 (SEQ ID NO:542), a second amino acid sequence being at least 70%, optionally at least 80%, preferably at least 85%, more preferably at least 90% and most preferably at least 95% homologous to a polypeptide having the sequence VSLCQQAGVQWYDLGSLQPLPPGFKQFSCLSLLSSWDYR (SEQ ID NO: 672) corresponding to amino acids 384-422 of S57296_{—}1_P59 (SEQ ID NO:542), and a third amino acid sequence being at least 90% or preferably at least about 95% homologous to amino acids 384-1255 of ERB2_HUMAN (SEQ ID NO:538), which also corresponds to amino acids 423-1294 of S57296_{—}1_P59 (SEQ ID NO:542), wherein said first amino acid sequence, second amino acid sequence and third amino acid sequence are contiguous and in a sequential order.

[0135] An isolated polypeptide encoding for an edge portion of S57296_{—}1_P59 (SEQ ID NO:542), comprising an amino acid sequence being at least 70%, optionally at least about 80%, preferably at least about 85%, more preferably at least about 90% and most preferably at least about 95% homologous to the sequence VSLCQQAGVQWYDLGSLQPLPPGFKQFSCLSLLSSWDYR (SEQ ID NO: 672) of S57296_{—}1_P59 (SEQ ID NO:542).

[0136] An isolated chimeric polypeptide encoding for S57296_{—}1_P59 (SEQ ID NO:542), comprising a first amino acid sequence being at least 90% or preferably at least about 95% homologous to amino acids 1-383 of NP_{—}004439 (SEQ ID NO:540), which also corresponds to amino acids 1-383 of S57296_{—}1_P59 (SEQ ID NO:542), a second amino acid sequence being at least 70%, optionally at least 80%, preferably at least 85%, more preferably at least 90% and most preferably at least 95% homologous to a polypeptide having the sequence VSLCQQAGVQWYDLGSLQPLPPGFKQFSCLSLLSSWDYR (SEQ ID NO: 672) corresponding to amino acids 384-422 of S57296_{—}1_P59 (SEQ ID NO:542), and a third amino acid sequence being at least 90% or preferably at least about 95% homologous to amino acids 384-1255 of NP_{—}004439 (SEQ ID NO:540), which also corresponds to amino acids 423-1294 of S57296_{—}1_P59 (SEQ ID NO:542), wherein said first amino acid sequence, second amino acid sequence and third amino acid sequence are contiguous and in a sequential order.

[0137] An isolated polypeptide encoding for an edge portion of S57296_{—}1_P59 (SEQ ID NO:542), comprising an amino acid sequence being at least 70%, optionally at least about 80%, preferably at least about 85%, more preferably at least about 90% and most preferably at least about 95% homologous to the sequence VSLCQQAGVQWYDLGSLQPLPPGFKQFSCLSLLSSWDYR (SEQ ID NO: 672) of S57296_{—}1_P59 (SEQ ID NO:542).

[0138] An isolated chimeric polypeptide encoding for S57296_{—}1_P59 (SEQ ID NO:542), comprising a first amino acid sequence being at least 70%, optionally at least 80%, preferably at least 85%, more preferably at least 90% and most preferably at least 95%, homologous to a polypeptide having the sequence MELAALCRWGLLLALLPPGAASTQVCTGTD (SEQ ID NO: 673) corresponding to amino acids 1-30 of S57296_{—}1_P59 (SEQ ID NO:542), a second amino acid sequence being at least 70%, optionally at least 80%, preferably at least 85%, more preferably at least 90% and most preferably at least 95% homologous to a polypeptide having the sequence MKLRLPASPETHLDMLRHLYQGCQVVQGNLELTYLPTNA (SEQ ID NO: 674) corresponding to amino acids 384-422 of S57296_{—}1_P59 (SEQ ID NO:542), a third amino acid sequence being at least 90% or preferably at least about 95% homologous to amino acids 354-1225 of NP_{—}001005862 (SEQ ID NO:539), which also corresponds to amino acids 423-1294 of S57296_{—}1_P59 (SEQ ID NO:542), and a fourth amino acid sequence being at least 90% or preferably at least about 95% homologous to amino acids 1-353 of NP_{—}001005862 (SEQ ID NO:539), which also corresponds to amino acids 31-383 of S57296_{—}1_P59 (SEQ ID NO:542), wherein said first amino acid sequence, second amino acid sequence, third amino acid sequence and fourth amino acid sequence are contiguous and in a sequential order.

[0139] An isolated polypeptide encoding for a head of S57296_{—}1_P59 (SEQ ID NO:542), comprising a polypeptide being at least 70%, optionally at least about 80%, preferably at least about 85%, more preferably at least about 90% and most preferably at least about 95% homologous to the sequence MELAALCRWGLLLALLPPGAASTQVCTGTD (SEQ ID NO: 673) of S57296_{—}1_P59 (SEQ ID NO:542).

[0140] An isolated polypeptide encoding for an edge portion of S57296_{—}1_P59 (SEQ ID NO:542), comprising an amino acid sequence being at least 70%, optionally at least about 80%, preferably at least about 85%, more preferably at least about 90% and most preferably at least about 95% homologous to the sequence MKLRLPASPETHLDMLRHLYQGCQVVQGNLELTYLPTNA (SEQ ID NO: 674) of S57296_{—}1_P59 (SEQ ID NO:542).

[0141] An isolated chimeric polypeptide encoding for S57296_{—}1_P65 (SEQ ID NO:543), comprising a first amino acid sequence being at least 90% or preferably at least about 95% homologous to amino acids 1-340 of Q9UK79_HUMAN (SEQ ID NO:534), which also corresponds to amino acids 1-340 of S57296_{—}1_P65 (SEQ ID NO:543), and a second amino acid sequence being at least 70%, optionally at least 80%, preferably at least 85%, more preferably at least 90% and most preferably at least 95% homologous to a polypeptide having the sequence VCYGLGMEHLREVRAVTSANIQEFAGCKKIFGSLAFLPESFDGDPASNTAPLQPEQLQVFETLEEIT GYLYISAWPDSLPDLSVFQNLQVIRGRILHNGAYSLTLQGLGISWLGLRSLRELGSGLALIHHNTHL CFVHTVPWDQLFRNPHQALLHTANRPEDECGKTGSPVCALPICQHTAVPRGPWQQRSWTCADCP SLCTLLDSAQLWLAWPLGMASLAGSYLPWHPSLPLCF (SEQ ID NO: 675) corresponding to amino acids 341-575 of S57296_{—}1_P65 (SEQ ID NO:543), wherein said first amino acid sequence and second amino acid sequence are contiguous and in a sequential order.

[0142] An isolated polypeptide encoding for an edge portion of S57296_{—}1_P65 (SEQ ID NO:543), comprising an amino acid sequence being at least 70%, optionally at least about 80%, preferably at least about 85%, more preferably at least about 90% and most preferably at least about 95% homologous to the sequence

(SEQ ID NO:675) of S57296_1_P65 (SEQ ID NO:543)

VCYGLGMEHLREVRAVTSANIQEFAGCKKIFGSLAFLPESFDGDPASNTA
PLQPEQLQVFETLEEITGYLYISAWPDSLPDLSVFQNLQVIRGRILHNGA
YSLTLQGLGISWLGLRSLRELGSGLALIHHNTHLCFVHTVPWDQLFRNPH
QALLHTANRPEDECGKTGSPVCALPICQHTAVPRGPWQQRSWTCADCPSL
CTLLDSAQLWLAWPLGMASLAGSYLPWHPSLPLCF.

[0143] An isolated chimeric polypeptide encoding for S57296_{—}1_P85 (SEQ ID NO:544), comprising a first amino acid sequence being at least 90% or preferably at least about 95% homologous to amino acids 1-340 of Q9UK79_HUMAN (SEQ ID NO:534), which also corresponds to amino acids 1-340 of S57296_{—}1_P85 (SEQ ID NO:544), and a second amino acid sequence being at least 70%, optionally at least 80%, preferably at least 85%, more preferably at least 90% and most preferably at least 95% homologous to a polypeptide having the sequence VCYGLGMEHLREVRAVTSANIQEFAGCKKIFGSLAFLPESFDGVSLCQQAGVQWYDLGSLQPLPP GFKQFSCLSLLSSWDYRDPASNTAPLQPEQLQVFETLEEITGYLYISAWPDSLPDLSVFQNLQVIRG RILHNGAYSLTLQGLGISWLGLRSLRELGSGLALIHHNTHLCFVHTVPWDQLFRNPHQALLHTANR PEDECGKTGSPVCALPICQHTAVPRGPWQQRSWTCADCPSLCTLLDSAQLWLAWPLGMASLAGS YLPWHPSLPLCF (SEQ ID NO: 676) corresponding to amino acids 341-614 of S57296_{—}1_P85 (SEQ ID NO:544), wherein said first amino acid sequence and second amino acid sequence are contiguous and in a sequential order.

[0144] An isolated polypeptide encoding for an edge portion of S57296_{—}1_P85 (SEQ ID NO:544), comprising an amino acid sequence being at least 70%, optionally at least about 80%, preferably at least about 85%, more preferably at least about 90% and most preferably at least about 95% homologous to the sequence

(SEQ ID NO:676) of S57296_1_P85 (SEQ ID NO:544)

VCYGLGMEHLREVRAVTSANIQEFAGCKKIFGSLAFLPESFDGVSLCQQA
GVQWYDLGSLQPLPPGFKQFSCLSLLSSWDYRDPASNTAPLQPEQLQVFE
TLEEITGYLYISAWPDSLPDLSVFQNLQVIRGRILHNGAYSLTLQGLGIS
WLGLRSLRELGSGLALIHHNTHLCFVHTVPWDQLFRNPHQALLHTANRPE
DECGKTGSPVCALPICQHTAVPRGPWQQRSWTCADCPSLCTLLDSAQLWL
AWPLGMASLAGSYLPWHPSLPLCF.

[0145] An isolated chimeric polypeptide encoding for S57296_{—}1_P97 (SEQ ID NO:545), comprising a first amino acid sequence being at least 90% or preferably at least about 95% homologous to amino acids 1-342 of Q9UK79_HUMAN (SEQ ID NO:534), which also corresponds to amino acids 1-342 of S57296_{—}1_P97 (SEQ ID NO:545), and a second amino acid sequence being at least 70%, optionally at least 80%, preferably at least 85%, more preferably at least 90% and most preferably at least 95% homologous to a polypeptide having the sequence QPPTLPRSSQSSSKCLRLWKRSQVTYTSQHGRTACLTSASSRTCK (SEQ ID NO: 677) corresponding to amino acids 343-387 of S57296_{—}1_P97 (SEQ ID NO:545), wherein said first amino acid sequence and second amino acid sequence are contiguous and in a sequential order.

[0146] An isolated polypeptide encoding for an edge portion of S57296_{—}1_P97 (SEQ ID NO:545), comprising an amino acid sequence being at least 70%, optionally at least about 80%, preferably at least about 85%, more preferably at least about 90% and most preferably at least about 95% homologous to the sequence QPPTLPRSSQSSSKCLRLWKRSQVTYTSQHGRTACLTSASSRTCK (SEQ ID NO: 677) of S57296_{—}1_P97 (SEQ ID NO:545).

[0147] An isolated chimeric polypeptide encoding for S57296_{—}1_P125 (SEQ ID NO:546), comprising a first amino acid sequence being at least 90% or preferably at least about 95% homologous to amino acids 1-648 of ERB2_HUMAN (SEQ ID NO:538), which also corresponds to amino acids 1-648 of S57296_{—}1_P125 (SEQ ID NO:546), and a second amino acid sequence being at least 70%, optionally at least 80%, preferably at least 85%, more preferably at least 90% and most preferably at least 95% homologous to a polypeptide having the sequence RLAWTPGCTLHCPSLPHWMLGGHCCREGTP (SEQ ID NO: 678) corresponding to amino acids 649-678 of S57296_{—}1_P125 (SEQ ID NO:546), wherein said first amino acid sequence and second amino acid sequence are contiguous and in a sequential order.

[0148] An isolated polypeptide encoding for an edge portion of S57296_{—}1_P125 (SEQ ID NO:546), comprising an amino acid sequence being at least 70%, optionally at least about 80%, preferably at least about 85%, more preferably at least about 90% and most preferably at least about 95% homologous to the sequence RLAWTPGCTLHCPSLPHWMLGGHCCREGTP (SEQ ID NO: 678) of S57296_{—}1_P125 (SEQ ID NO:546).

[0149] An isolated chimeric polypeptide encoding for S57296_{—}1_P125 (SEQ ID NO:546), comprising a first amino acid sequence being at least 90% or preferably at least about 95% homologous to amino acids 1-648 of NP_{—}004439 (SEQ ID NO:540), which also corresponds to amino acids 1-648 of S57296_{—}1_P125 (SEQ ID NO:546), and a second amino acid sequence being at least 70%, optionally at least 80%, preferably at least 85%, more preferably at least 90% and most preferably at least 95% homologous to a polypeptide having the sequence RLAWTPGCTLHCPSLPHWMLGGHCCREGTP (SEQ ID NO: 678) corresponding to amino acids 649-678 of S57296_{—}1_P125 (SEQ ID NO:546), wherein said first amino acid sequence and second amino acid sequence are contiguous and in a sequential order.

[0150] An isolated polypeptide encoding for an edge portion of S57296_{—}1_P125 (SEQ ID NO:546), comprising an amino acid sequence being at least 70%, optionally at least about 80%, preferably at least about 85%, more preferably at least about 90% and most preferably at least about 95% homologous to the sequence RLAWTPGCTLHCPSLPHWMLGGHCCREGTP (SEQ ID NO: 678) of S57296_{—}1_P125 (SEQ ID NO:546).

[0151] An isolated chimeric polypeptide encoding for S57296_{—}1_P125 (SEQ ID NO:546), comprising a first amino acid sequence being at least 70%, optionally at least 80%, preferably at least 85%, more preferably at least 90% and most preferably at least 95%, homologous to a polypeptide having the sequence MELAALCRWGLLLALLPPGAASTQVCTGTD (SEQ ID NO: 673) corresponding to amino acids 1-30 of S57296_{—}1_P125 (SEQ ID NO:546), a second amino acid sequence being at least 70%, optionally at least 80%, preferably at least 85%, more preferably at least 90% and most preferably at least 95%, homologous to a polypeptide having the sequence MKLRLPASPETHLDMLRHLYQGCQVVQGNLELTYLPTNASLSFLQDIQEVQGYVLIAHNQVRQVP LQRLRIVRGTQLFEDNYALAVLDNGDPLNNTTPVTGASPGGLRELQLRSLTEILKGGVLIQRNPQL CYQDTILWKDIFHKNNQLALTLIDTNRSRACHPCSPMCKGSRCWGESSEDCQSLTRTVCAGGCAR CKGPLPTDCCHEQCAAGCTGPKHSDCLACLHFNHSGICELHCPALVTYNTDTFESMPNPEGRYTFG ASCVTACPYNYLSTDVGSCTLVCPLHNQEVTAEDGTQRCEKCSKPCARVCYGLGMEHLREVRAV TSANIQEFAGCKKIFGSLAFLPESFDGDPASNTAPLQPEQLQVFETLEEITGYLYISAWPDSLPDLSV FQNLQVIRGRILHNGAYSLTLQGLGISWLGLRSLRELGSGLALIHHNTHLCFVHTVPWDQLFRNPH QALLHTANRPEDECVGEGLACHQLCARGHCWGPGPTQCVNCSQFLRGQECVEECRVLQGLPREY VNARHCLPCHPECQPQNGSVTCFGPEADQCVACAHYKDPPFCVARCPSGVKPDLSYMPIWKFPDE EGACQPCPINCTHSCVDLDDKGCPAEQRARLAWTPGCTLHCPSLPHWM corresponding to amino acids 649-678 of S57296_{—}1_P125 (SEQ ID NO:546), and a third amino acid sequence being at least 90% or preferably at least about 95% homologous to amino acids 1-618 of NP_{—}001005862 (SEQ ID NO:539), which also corresponds to amino acids 31-648 of S57296_{—}1_P125 (SEQ ID NO:546), wherein said first amino acid sequence, second amino acid sequence and third amino acid sequence are contiguous and in a sequential order.

[0152] An isolated polypeptide encoding for a head of S57296_{—}1_P125 (SEQ ID NO:546), comprising a polypeptide being at least 70%, optionally at least about 80%, preferably at least about 85%, more preferably at least about 90% and most preferably at least about 95% homologous to the sequence MELAALCRWGLLLALLPPGAASTQVCTGTD (SEQ ID NO: 673) of S57296_{—}1_P125 (SEQ ID NO:546).

[0153] An isolated chimeric polypeptide encoding for S57296_{—}1_P125 (SEQ ID NO:546), comprising a first amino acid sequence being at least 90% or preferably at least about 95% to amino acids 1-340 of Q9UK79_HUMAN (SEQ ID NO:534), which also corresponds to amino acids 1-340 of S57296_{—}1_P125 (SEQ ID NO:546), and a second amino acid sequence being at least 70%, optionally at least 80%, preferably at least 85%, more preferably at least 90% and most preferably at least 95% homologous to a polypeptide having the sequence VCYGLGMEHLREVRAVTSANIQEFAGCKKIFGSLAFLPESFDGDPASNTAPLQPEQLQVFETLEEIT GYLYISAWPDSLPDLSVFQNLQVIRGRILHNGAYSLTLQGLGISWLGLRSLRELGSGLALIHHNTHL CFVHTVPWDQLFRNPHQALLHTANRPEDECVGEGLACHQLCARGHCWGPGPTQCVNCSQFLRGQ ECVEECRVLQGLPREYVNARHCLPCHPECQPQNGSVTCFGPEADQCVACAHYKDPPFCVARCPSG VKPDLSYMPIWKFPDEEGACQPCPINCTHSCVDLDDKGCPAEQRARLAWTPGCTLHCPSLPHWML GGHCCREGTP (SEQ ID NO: 680) corresponding to amino acids 341-678 of S57296_{—}1_P125 (SEQ ID NO:546), wherein said first amino acid sequence and second amino acid sequence are contiguous and in a sequential order.

[0154] An isolated polypeptide encoding for an edge portion of S57296_{—}1_P125 (SEQ ID NO:546), comprising an amino acid sequence being at least 70%, optionally at least about 80%, preferably at least about 85%, more preferably at least about 90% and most preferably at least about 95% homologous to the sequence

(SEQ ID NO:546)

VCYGLGMEHLREVRAVTSANIQEFAGCKKIFGSLAFLPESFDGDPASNTA
PLQPEQLQVFETLEEITGYLYISAWPDSLPDLSVFQNLQVIRGRILHNGA
YSLTLQGLGISWLGLRSLRELGSGLALIHHNTHLCFVHTVPWDQLFRNPH
QALLHTANRPEDECVGEGLACHQLCARGHCWGPGPTQCVNCSQFLRGQEC
VEECRVLQGLPREYVNARHCLPCHPECQPQNGSVTCFGPEADQCVACAHY
KDPPFCVARCPSGVKPDLSYMPIWKFPDEEGACQPCPINCTHSCVDLDDK
GCPAEQRARLAWTPGCTLHCPSLPHWMLGGHCCREGTP
(SEQ ID NO: 680) of S57296_1_P125.

[0155] An isolated chimeric polypeptide encoding for S57296_{—}1_P127 (SEQ ID NO:547), comprising a first amino acid sequence being at least 90% or preferably at least about 95% homologous to amino acids 1-383 of ERB2_HUMAN (SEQ ID NO:538), which also corresponds to amino acids 1-383 of S57296_{—}1_P127 (SEQ ID NO:547), a second amino acid sequence being at least 70%, optionally at least 80%, preferably at least 85%, more preferably at least 90% and most preferably at least 95% homologous to a polypeptide having the sequence VSLCQQAGVQWYDLGSLQPLPPGFKQFSCLSLLSSWDYR (SEQ ID NO: 672) corresponding to amino acids 384-422 of S57296_{—}1_P127 (SEQ ID NO:547), a third amino acid sequence being at least 90% or preferably at least about 95% to amino acids 384-648 of ERB2_HUMAN (SEQ ID NO:538), which also corresponds to amino acids 423-687 of S57296_{—}1_P127 (SEQ ID NO:547), and a fourth amino acid sequence being at least 70%, optionally at least 80%, preferably at least 85%, more preferably at least 90% and most preferably at least 95% homologous to a polypeptide having the sequence RLAWTPGCTLHCPSLPHWMLGGHCCREGTP (SEQ ID NO: 678) corresponding to amino acids 688-717 of S57296_{—}1_P127 (SEQ ID NO:547), wherein said first amino acid sequence, second amino acid sequence, third amino acid sequence and fourth amino acid sequence are contiguous and in a sequential order.

[0156] An isolated polypeptide encoding for an edge portion of S57296_{—}1_P127 (SEQ ID NO:547), comprising an amino acid sequence being at least 70%, optionally at least about 80%, preferably at least about 85%, more preferably at least about 90% and most preferably at least about 95% homologous to the sequence VSLCQQAGVQWYDLGSLQPLPPGFKQFSCLSLLSSWDYR (SEQ ID NO: 672) of S57296_{—}1_P127 (SEQ ID NO:547).

[0157] C. An isolated polypeptide encoding for an edge portion of S57296_{—}1_P127 (SEQ ID NO:547), comprising an amino acid sequence being at least 70%, optionally at least about 80%, preferably at least about 85%, more preferably at least about 90% and most preferably at least about 95% homologous to the sequence RLAWTPGCTLHCPSLPHWMLGGHCCREGTP (SEQ ID NO: 678) of S57296_{—}1_P127 (SEQ ID NO:547).

[0158] An isolated chimeric polypeptide encoding for S57296_{—}1_P127 (SEQ ID NO:547), comprising a first amino acid sequence being at least 90% or preferably at least about 95% homologous to amino acids 1-383 of NP_{—}004439 (SEQ ID NO:540), which also corresponds to amino acids 1-383 of S57296_{—}1_P127 (SEQ ID NO:547), a second amino acid sequence being at least 70%, optionally at least 80%, preferably at least 85%, more preferably at least 90% and most preferably at least 95% homologous to a polypeptide having the sequence VSLCQQAGVQWYDLGSLQPLPPGFKQFSCLSLLSSWDYR (SEQ ID NO: 672) corresponding to amino acids 384-422 of S57296_{—}1_P127 (SEQ ID NO:547), a third amino acid sequence being at least 90% or preferably at least about 95% homologous to amino acids 384-648 of NP_{—}004439 (SEQ ID NO:540), which also corresponds to amino acids 423-687 of S57296_{—}1_P127 (SEQ ID NO:547), and a fourth amino acid sequence being at least 70%, optionally at least 80%, preferably at least 85%, more preferably at least 90% and most preferably at least 95% homologous to a polypeptide having the sequence RLAWTPGCTLHCPSLPHWMLGGHCCREGTP (SEQ ID NO: 678) corresponding to amino acids 688-717 of S57296_{—}1_P127 (SEQ ID NO:547), wherein said first amino acid sequence, second amino acid sequence, third amino acid sequence and fourth amino acid sequence are contiguous and in a sequential order.

[0159] An isolated polypeptide encoding for an edge portion of S57296_{—}1_P127 (SEQ ID NO:547), comprising an amino acid sequence being at least 70%, optionally at least about 80%, preferably at least about 85%, more preferably at least about 90% and most preferably at least about 95% homologous to the sequence VSLCQQAGVQWYDLGSLQPLPPGFKQFSCLSLLSSWDYR (SEQ ID NO: 672) of S57296_{—}1_P127 (SEQ ID NO:547).

[0160] An isolated polypeptide encoding for an edge portion of S57296_{—}1_P127 (SEQ ID NO:547), comprising an amino acid sequence being at least 70%, optionally at least about 80%, preferably at least about 85%, more preferably at least about 90% and most preferably at least about 95% homologous to the sequence RLAWTPGCTLHCPSLPHWMLGGHCCREGTP (SEQ ID NO: 678) of S57296_{—}1_P127 (SEQ ID NO:547).

[0161] An isolated chimeric polypeptide encoding for S57296_{—}1_P127 (SEQ ID NO:547), comprising a first amino acid sequence being at least 70%, optionally at least 80%, preferably at least 85%, more preferably at least 90% and most preferably at least 95%, homologous to a polypeptide having the sequence MELAALCRWGLLLALLPPGAASTQVCTGTD (SEQ ID NO: 673) corresponding to amino acids 1-30 of S57296_{—}1_P127 (SEQ ID NO:547), a second amino acid sequence being at least 70%, optionally at least 80%, preferably at least 85%, more preferably at least 90% and most preferably at least 95% homologous to a polypeptide having the sequence MKLRLPASPETHLDMLRHLYQGCQVVQGNLELTYLPTNA (SEQ ID NO: 674) corresponding to amino acids 384-422 of S57296_{—}1_P127 (SEQ ID NO:547), a third amino acid sequence being at least 90% or preferably at least about 95% homologous to amino acids 1-353 of NP_{—}001005862 (SEQ ID NO:539), which also corresponds to amino acids 31-383 of S57296_{—}1_P127 (SEQ ID NO:547), a fourth amino acid sequence being at least 70%, optionally at least 80%, preferably at least 85%, more preferably at least 90% and most preferably at least 95%, homologous to a polypeptide having the sequence DPASNTAPLQPEQLQVFETLEEITGYLYISAWPDSLPDLSVFQNLQVIRGRILHNGAYSLTLQGLGIS WLGLRSLRELGSGLALIHHNTHLCFVHTVPWDQLFRNPHQALLHTANRPEDECVGEGLACHQLC ARGHCWGPGPTQCVNCSQFLRGQECVEECRVLQGLPREYVNARHCLPCHPECQPQNGSVTCFGPE ADQCVACAHYKDPPFCVARCPSGVKPDLSYMPIWKFPDEEGACQPCPINCTHSCVDLDDKGCPAE QRARLAWTPGCTLHCPSLPHWMLGGHCCREGTP corresponding to amino acids 688-717 of S57296_{—}1_P127 (SEQ ID NO:547), and a fifth amino acid sequence being at least 90% homologous to amino acids 354-618 of NP_{—}001005862 (SEQ ID NO:539), which also corresponds to amino acids 423-687 of S57296_{—}1_P127 (SEQ ID NO:547), wherein said first amino acid sequence, second amino acid sequence, third amino acid sequence, fourth amino acid sequence and fifth amino acid sequence are contiguous and in a sequential order.

[0162] An isolated polypeptide encoding for a head of S57296_{—}1_P127 (SEQ ID NO:547), comprising a polypeptide being at least 70%, optionally at least about 80%, preferably at least about 85%, more preferably at least about 90% and most preferably at least about 95% homologous to the sequence MELAALCRWGLLLALLPPGAASTQVCTGTD (SEQ ID NO: 673) of S57296_{—}1_P127 (SEQ ID NO:547).

[0163] An isolated polypeptide encoding for an edge portion of S57296_{—}1_P127 (SEQ ID NO:547), comprising an amino acid sequence being at least 70%, optionally at least about 80%, preferably at least about 85%, more preferably at least about 90% and most preferably at least about 95% homologous to the sequence MKLRLPASPETHLDMLRHLYQGCQVVQGNLELTYLPTNA (SEQ ID NO: 674) of S57296_{—}1_P127 (SEQ ID NO:547).

[0164] An antibody capable of specifically binding to an epitope (antigen determinant) of an amino acid sequence as described herein. An antibody that “specifically binds” to a particular antigen determinant, for example, an antigen determinant present on a variant protein polypeptide of the invention, preferably does not substantially recognize or bind to other molecules in a sample, such as a biological sample. In some embodiments, binding of a variant protein antibody is at least about 2, preferably at least about 5, and more preferably at least about 10-fold greater than binding observed under the same reaction conditions to a molecule that does not include an antigen determinant present on a variant protein.

[0165] An antibody capable of specifically binding to an epitope of an amino acid sequence as described above, optionally wherein said amino acid sequence corresponds to a bridge, edge portion, tail, or head as in any of the previous claims, also optionally wherein said antibody is capable of differentiating between a splice variant having said epitope and a corresponding known protein.

[0166] A kit for detecting a Marker-detectable disease, comprising a kit detecting specific expression of a splice variant as described herein.

[0167] Optionally, the kit comprises a NAT-based technology; optionally and preferably, the kit further comprises at least one nucleotide probe or primer, alternatively and optionally this kit comprises at least one primer pair capable of selectively hybridizing to a nucleic acid sequence as described herein; alternatively and optionally, said kit further comprises at least one oligonucleotide capable of selectively hybridizing to a nucleic acid sequence according to any of the above claims.

[0168] Alternatively and optionally, the kit comprises an antibody according to any of the above claims (optionally and preferably, the kit further comprises at least one reagent for performing an ELISA or a Western blot.

[0169] A method for detecting a Marker-detectable disease, comprising detecting specific expression of a splice variant as described herein; optionally the marker-detectable disease is cluster N56180 marker-detectable disease, cluster S67314 marker-detectable disease, cluster HUMNATPEP marker-detectable disease, cluster HUMCDDANF marker-detectable disease, cluster HSACMHCP marker-detectable disease, cluster HSCREACT marker-detectable disease, or cluster Z3624 marker-detectable disease, and is selected from the group consisting of variety of cardiac diseases. According to preferred embodiments of the present invention, cardiac disease and/or pathology and/or condition and/or disorder may comprise one or more of Myocardial infarct, acute coronary syndrome, angina pectoris (stable and unstable), cardiomyopathy, myocarditis, congestive heart failure or any type of heart failure, the detection of reinfarction, the detection of success of thrombolytic therapy after Myocardial infarct, Myocardial infarct after surgery, assessing the size of infarct in Myocardial infarct, the differential diagnosis of heart related conditions from lung related conditions (as pulmonary embolism), the differential diagnosis of Dyspnea, and cardiac valves related conditions.

[0170] Alternatively and optionally, the marker-detectable disease is stroke and a marker comprises one or more of IL-1ra, C-reactive protein (CRP) or variants thereof as described herein with regard to cluster HSCREACT, von Willebrand factor (vWF), vascular endothelial growth factor (VEGF) or variants thereof as described with regard to U.S. Pat. No. 6,783,954 (previously incorporated by reference), matrix metalloprotease-9 (MMP-9), neural cell adhesion molecule (NCAM) or variants thereof as described with regard to PCT Application No. WO 01/29215 (incorporated by reference as if fully set forth herein), BNP or variants thereof as described herein with regard to cluster HUMNATPEP, markers from cluster N56180, S67314, HUMCDDANF and/or HSACMHCP, and caspase-3, or markers related thereto, or combinations thereof as described herein. Stroke optionally comprises stroke or neural tissue injury, or any type of cerebrovascular accident. Stroke optionally and preferably comprises ischemic stroke, hemorrhagic stroke or transient ischemic attacks. Ischemic stroke encompasses thrombotic, embolic, lacunar and hypoperfusion types of strokes. Stroke as a marker-detectable disease may also optionally comprise one or more of brain trauma, in case it is unclear whether accompanied by stroke or not; migraine as a symptom; bleeding in any part of the brain or inside the skull that cause or didn't cause damage to brain tissue; tumor. Such markers may help determine: the time of stroke; the type of stroke; the extent of tissue damage as a result of the stroke; response to immediate treatments that are meant to alleviate the extent of stroke and brain damage, when available.

[0171] With regard to stroke, according to preferred embodiments of the present invention, a marker as described herein or a panel may optionally and preferably provide diagnosis of stroke and indication if an ischemic stroke has occurred; diagnosis of stroke and indication if a hemorrhagic stroke has occurred; diagnosis of stroke, indication if an ischemic stroke has occurred, and indication if a hemorrhagic stroke has occurred; diagnosis of stroke and prognosis of a subsequent cerebral vasospasm; and diagnosis of stroke, indication if a hemorrhagic stroke has occurred, and prognosis of a subsequent cerebral vasospasm.

[0172] According to other optional embodiments of the present invention, there are provided methods of identifying a patient at risk for cerebral vasospasm. Such methods preferably comprise comparing an amount of one or more marker(s) predictive of a subsequent cerebral vasospasm in a test sample from a patient diagnosed with a subarachnoid hemorrhage. Such markers may be one or more markers related to blood pressure regulation, markers related to inflammation, markers related to apoptosis, and/or specific markers of neural tissue injury.

[0173] Alternatively and optionally, the marker-detectable disease is cardiomyopathy and myocarditis, and/or related conditions as described herein, and a marker comprises a marker optionally selected from the group consisting of one or more variants in N56180, S67314, HUMNATPEP, HUMCDDANF, HSACMHCP, HSCREACT or Z36249 clusters, or combinations thereof.

[0174] Alternatively and optionally, the marker-detectable disease is acute and chronic inflammation, and/or CVS diseases, and a marker comprises one or more of N56180 variants, S67314 variants, HUMNATPEP variants, HUMCDDANF variants, HSACMHCP variants, HSCREACT variants and/or Z3624 variants, including for a spectrum of diseases where an inflammatory process plays a substantial role. Conditions that may be diagnosed by these markers or variants of them include but are not limited to the presence, risk and/or extent of the following: conditions that entail an inflammatory process that involves blood vessels including but not limited to hypercholesterolemia, diabetes, atherosclerosis, inflammation that involves blood vessels—whether acute or chronic including but not limited to the coronary arteries and blood vessels of the brain, myocardial infarction, cerebral stroke, peripheral vascular disease, vasculitis, polyarteritis nodosa, ANCA associated small vessel vasculitis, Churg-Strauss syndrome, Henoch-Schonlein purpura, scleroderma, thromboangiitis obliterans, temporal arteritis, Takayasu's arteritis, hypersensitivity vasculitis, Kawasaki disease, Behçet syndrome, and their complications including but not limited to coronary disease, angina pectoris, deep vein thrombosis, renal disease, diabetic nephropathy, lupus nephritis, renal artery thrombosis, renal artery stenosis, atheroembolic disease of the renal arteries, renal vein thrombosis, hemolytic uremic syndrome, thrombotic thrombocytopenic purpura, arteriolar nephrosclerosis, preeclampsia, eclampsia, albuminuria, microalbuminuria, glomerulonephritis, renal failure, hypertension, uremia, cerebrovascular disease, peripheral vascular disease, intermittent claudication, abdominal angina; rheumatic/autoimmune diseases that involve systemic immune reaction including but not limited to rheumatoid arthritis, scleroderma, mixed connective tissue disease, Sjogren syndrome, ankylosing spondylitis, spondyloarthropathy, psoriasis, psoriatic arthritis, myositis and systemic lupus erythematosus; acute and/or chronic infective processes that involve systemic immune reaction including but not limited to pneumonia, bacteremia, sepsis, pyelonephritis, cellulitis, osteomyelitis, meningitis and viral hepatitis; malignant and idiopathic processes that involve systemic immune reaction and/or proliferation of immune cells including but not limited to granulomatous disorders, Wegener's granulomatosis, lymphomatoid granulomatosis/polymorphic reticulosis, idiopathic midline granuloma, multiple myeloma, Waldenstrom's macroglobulinemia, Castleman's disease, amyloidosis, lymphoma, histiocytosis, renal cell carcinoma and paraneoplastic syndromes; conditions where CRP was shown to have a positive correlation with the presence of the condition including but not limited to weight loss, anorexia-cachexia syndrome, extent of disease, recurrence in advanced cancer, diabetes (types 1 & 2), obesity, hypertension, preterm delivery; conditions which have similar symptoms, signs and complications as the conditions above and where the differential diagnosis between them and the conditions above is of clinical importance including but not limited to: other (non vascular) causes of heart disease, renal disease and cerebral disease; other (non rheumatic) causes of arthropathy and musculoskeletal pain; other causes of non-specific symptoms and signs such as fever of unknown origin, loss of appetite, weight loss, nonspecific pains, breathing difficulties and anxiety.

[0175] Alternatively and optionally, the marker-detectable disease is congestive heart failure (CHF), and a marker comprises a marker optionally selected from the group consisting of one or more variants in N56180 variants, S67314 variants, HUMNATPEP variants, HUMCDDANF variants, HSACMHCP variants, HSCREACT variants, HSTGFB1 variants and/or Z3624 variants or combinations thereof. Other conditions that may be diagnosed by these markers or variants of them include but are not limited to the presence, risk and/or extent of the following: sudden cardiac death, from arrhythmia or any other heart related reason; rejection of a transplanted heart; conditions that lead to heart failure including but not limited to myocardial infarction, angina, arrhythmias, valvular diseases, atrial and/or ventricular septal defects; conditions that cause atrial and or ventricular wall volume overload, including but not limited to systemic arterial hypertension, pulmonary hypertension and pulmonary embolism; conditions which have similar clinical symptoms as heart failure and as states that cause atrial and or ventricular pressure-overload, where the differential diagnosis between these conditions to the latter is of clinical importance including but not limited to breathing difficulty and/or hypoxia due to pulmonary disease, anemia or anxiety.

[0176] Alternatively and optionally, the marker-detectable disease is cluster HSSTROL3 marker-detectable disease and is selected from the group consisting of variety of cancers, including but not limited to colon cancer, breast cancer, ovarian cancer, prostate cancer, or lung cancer.

[0177] With regard to lung cancer, the disease (and/or diagnostic method to be performed) optionally and preferably comprises one or more of invasive or metastatic lung cancer; squamous cell lung carcinoma, lung adenocarcinoma, carcinoid, small cell lung cancer or non-small cell lung cancer; detection of overexpression in lung metastasis (vs. primary tumor); detection of overexpression in lung cancer, preferably non small cell lung cancer, preferably adenocarcinoma, squamous cell cancer or carcinoid, or large cell carcinoma; identification of a metastasis of unknown origin which originated from a primary lung cancer; assessment of a malignant tissue residing in the lung that is from a non-lung origin, including but not limited to: osteogenic and soft tissue sarcomas; colorectal, uterine, cervix and corpus tumors; head and neck, breast, testis and salivary gland cancers; melanoma; and bladder and kidney tumors; distinguishing between different types of lung cancer, therefore potentially affect treatment choice (e.g. small cell vs. non small cell tumors); analysis of unexplained dyspnea and/or chronic cough and/or hemoptysis; differential diagnosis of the origin of a pleural effusion; diagnosis of conditions which have similar symptoms, signs and complications as lung cancer and where the differential diagnosis between them and lung cancer is of clinical importance including but not limited to: non-malignant causes of lung symptoms and signs, including but not limited to: lung lesions and infiltrates, wheeze, stridor, tracheal obstruction, esophageal compression, dysphagia, recurrent laryngeal nerve paralysis, hoarseness, phrenic nerve paralysis with elevation of the hemidiaphragm and Horner syndrome; or detecting a cause of any condition suggestive of a malignant tumor including but not limited to anorexia, cachexia, weight loss, fever, hypercalcemia, hypophosphatemia, hyponatremia, syndrome of inappropriate secretion of antidiuretic hormone, elevated ANP, elevated ACTH, hypokalemia, clubbing, neurologic-myopathic syndromes and thrombophlebitis.

[0178] With regard to breast cancer, the disease (and/or diagnostic method to be performed) optionally and preferably comprises one or more of invasive or metastatic breast cancer; determining a probable outcome; detecting breast cancer in patients with age above 55 and/or patients with an age below 45; identification of a metastasis of unknown origin which originated from a primary breast cancer tumor; assessing lymphadenopathy, and in particular axillary lymphadenopathy; distinguishing between different types of breast cancer, therefore potentially affect treatment choice (e.g. as HER-2); differentially diagnosing between a benign and malignant breast mass; as a tool in the assessment of conditions affecting breast skin (e.g. Paget's disease) and their differentiation from breast cancer; differential diagnosis of breast pain or discomfort resulting from either breast cancer or other possible conditions (e.g. mastitis, Mondors syndrome); non-breast cancer conditions which have similar symptoms, signs and complications as breast cancer and where the differential diagnosis between them and breast cancer is of clinical importance including but not limited to: abnormal mammogram and/or nipple retraction and/or nipple discharge due to causes other than breast cancer, including but not limited to benign breast masses, melanoma, trauma and technical and/or anatomical variations; determining a cause of any condition suggestive of a malignant tumor including but not limited to anorexia, cachexia, weight loss, fever, hypercalcemia, paraneoplastic syndrome; or determining a cause of lymphadenopathy, weight loss and other signs and symptoms associated with breast cancer but originate from diseases different from breast cancer including but not limited to other malignancies, infections and autoimmune diseases.

[0179] With regard to prostate cancer, the disease (and/or diagnostic method to be performed) optionally and preferably comprises one or more of invasive or metastatic prostate cancer.

[0180] With regard to colon cancer, the disease (and/or diagnostic method to be performed) optionally and preferably comprises one or more of invasive or metastatic colon cancer.

[0181] With regard to ovarian cancer, the disease (and/or diagnostic method to be performed) optionally and preferably comprises one or more of invasive or metastatic ovarian cancer; correlating stage and malignant potential; identification of a metastasis of unknown origin which originated from a primary ovarian cancer, for example gastric carcinoma (such as Krukenberg tumor), breast cancer, colorectal carcinoma and pancreatic carcinoma; distinguishing between different types of ovarian cancer, therefore potentially affect treatment choice (e.g. discrimination between epithelial tumors and germ cell tumors); differential diagnosis between benign and malignant ovarian cysts; diagnosing a cause of infertility, particularly differential diagnosis of various causes thereof; detecting of one or more non-ovarian cancer conditions that may elevate serum levels of ovary related markers, including but not limited to: cancers of the endometrium, cervix, fallopian tubes, pancreas, breast, lung and colon; nonmalignant conditions such as pregnancy, endometriosis, pelvic inflammatory disease and uterine fibroids; diagnosing conditions which have similar symptoms, signs and complications as ovarian cancer and where the differential diagnosis between them and ovarian cancer is of clinical importance including but not limited to: non-malignant causes of pelvic mass, including, but not limited to: benign (functional) ovarian cyst, uterine fibroids, endometriosis, benign ovarian neoplasms and inflammatory bowel lesions; determining a cause of any condition suggestive of a malignant tumor including but not limited to anorexia, cachexia, weight loss, fever, hypercalcemia, skeletal or abdominal pain, paraneoplastic syndrome, or ascites.

[0182] With regard to a marker-detectable disease comprising colon cancer, breast cancer, ovarian cancer, prostate cancer, or lung cancer, optionally and preferably any condition or method of use described above is also suitable for any marker described below as being diagnostically useful for that marker-detectable disease.

[0183] Alternatively and optionally, the marker-detectable disease is cluster HUMGRP5E marker-detectable, cluster T94936 marker-detectable, or cluster HSTGFB1 marker-detectable disease and is selected from the group consisting of variety of cancers, including but not limited to colon cancer, breast cancer, ovarian cancer, lung cancer; and colon, breast, ovarian, and lung cancer invasion and metastasis.

[0184] Alternatively and optionally, the marker-detectable disease is cluster S57296 marker-detectable disease and is selected from the group consisting of variety of cancers, including but not limited to breast cancer, ovarian cancer, lung cancer; and breast, ovarian, and lung cancer invasion and metastasis.

[0185] Alternatively and optionally, the marker-detectable disease is cluster M78530 marker-detectable disease and is selected from the group consisting of variety of cancers, including but not limited to ovarian cancer and ovarian cancer invasion and metastasis.

[0186] Detecting specific expression is optionally performed with a NAT-based technology (optionally comprising at least one nucleotide probe or primer), and/or with an immunoassay (optionally comprising an antibody according to any of the above embodiments).

[0187] There is also optionally provided a biomarker capable of detecting Marker-detectable disease, comprising any of the above nucleic acid sequences or a fragment thereof, or any of the above amino acid sequences or a fragment thereof.

[0188] There is also optionally provided a method for screening for variant-detectable disease, comprising detecting cells affected by a Marker-detectable disease with a biomarker or an antibody or a method or assay according to any of the above embodiments.

[0189] There is also optionally provided a method for screening for a disease, comprising detecting cells affected by the disease using a marker selected from the group consisting of:
[0190] a. an amino acid sequence selected from the group consisting of SEQ ID NOs:84-90, 114-117, 139-141, 165-166, 239-244, 317-322, 364-369, 401-404, 427-429, 463-468, 542-547, 579-582, 619-621 or a homologue or fragment thereof;
[0191] b. an amino acid sequence corresponding to a bridge, edge portion, tail, or head having an amino acid sequence selected from the group consisting of SEQ ID NOs:628-684 or a homologue or fragment thereof;
[0192] c. a polynucleotide having a sequence selected from the group consisting of SEQ ID NOs:54-60, 100-103, 127-130, 151-153, 167-173, 251-260, 338-345, 388-392, 411-413, 433-438, 478-483, 564-567, 592-594 or a homologue or fragment thereof;
[0193] d. a polynucleotide comprising a node having a sequence selected from the group consisting of SEQ ID NOs:61-82, 104-111, 131-137, 154-163, 174-234, 261-315, 346-362, 393-399, 414-425, 439-462, 484-533, 568-578, 595-615;
[0194] e. an antibody capable of specifically binding to at least one epitope of an amino acid sequence selected from the group consisting of SEQ ID NOs: 84-90, 114-117, 139-141, 165-166, 239-244, 317-322, 364-369, 401-404, 427-429, 463-468, 542-547, 579-582, 619-621, 628-684,
[0195] f. an oligonucleotide having a sequence selected from the group consisting of SEQ ID NOs:10-26, 93, 96, 99, 120, 123, 126, 144, 147, 150, 247, 250, 325, 328, 331, 334, 337, 370, 375, 378, 381, 384, 387, 407, 410, 432, 471, 474, 477, 550, 552, 557, 560, 563, 585, 588, 591, 624, 627, 698;
[0196] g. a primer pair, comprising a pair of isolated oligonucleotides capable of amplifying an amplicon having a sequence selected from the group consisting of SEQ ID NOs: 93, 96, 99, 120, 123, 126, 144, 147, 150, 247, 250, 325, 328, 331, 334, 337, 370, 375, 378, 381, 384, 387, 407, 410, 432, 471, 474, 477, 550, 552, 557, 560, 563, 585, 588, 591, 624, 627, 698;
[0197] h. a primer pair, comprising a pair of isolated oligonucleotides having a sequence selected from the group consisting of SEQ ID NOs: 91-92, 94-95, 97-98, 121-122, 124-125, 142-143, 145-146, 148-149, 245-246, 248-249, 323-324, 326-327, 329-330, 332-333, 335-336, 371-372, 373-374, 376-377, 379-380, 382-383, 385-386, 405-406, 408-409, 430-431, 469-470, 472-473, 475-476, 548-549, 551 and 701, 553-554, 555-556, 558-559, 561-562, 583-584, 586-587, 589-590, 622-623, 699-700,
   to detect differential expression of a splice variant according to the invention.

[0198] There is also optionally provided a method for diagnosing a marker-detectable disease, comprising detecting cells affected by Marker-detectable disease with a biomarker or an antibody or a method or assay according to any of the above embodiments.

[0199] There is also optionally provided a method for diagnosing a disease, comprising detecting cells affected by the disease using a marker selected from the group consisting of:
[0200] a. an amino acid sequence selected from the group consisting of SEQ ID NOs:84-90, 114-117, 139-141, 165-166, 239-244, 317-322, 364-369, 401-404, 427-429, 463-468, 542-547, 579-582, 619-621 or a homologue or fragment thereof;
[0201] b. an amino acid sequence corresponding to a bridge, edge portion, tail, or head having an amino acid sequence selected from the group consisting of SEQ ID NOs:628-684 or a homologue or fragment thereof;
[0202] c. a polynucleotide having a sequence selected from the group consisting of SEQ ID NOs:54-60, 100-103, 127-130, 151-153, 167-173, 251-260, 338-345, 388-392, 411-413, 433-438, 478-483, 564-567, 592-594 or a homologue or fragment thereof;
[0203] d. a polynucleotide comprising a node having a sequence selected from the group consisting of SEQ ID NOs:61-82, 104-111, 131-137, 154-163, 174-234, 261-315, 346-362, 393-399, 414-425, 439-462, 484-533, 568-578, 595-615;
[0204] e. an antibody capable of specifically binding to at least one epitope of an amino acid sequence selected from the group consisting of SEQ ID NOs: 84-90, 114-117, 139-141, 165-166, 239-244, 317-322, 364-369, 401-404, 427-429, 463-468, 542-547, 579-582, 619-621, 628-684;
[0205] f. an oligonucleotide having a sequence selected from the group consisting of SEQ ID NOs:10-26, 93, 96, 99, 120, 123, 126, 144, 147, 150, 247, 250, 325, 328, 331, 334, 337, 370, 375, 378, 381, 384, 387, 407, 410, 432, 471, 474, 477, 550, 552, 557, 560, 563, 585, 588, 591, 624, 627, 698;
[0206] g. a primer pair, comprising a pair of isolated oligonucleotides capable of amplifying an amplicon having a sequence selected from the group consisting of SEQ ID NOs: 93, 96, 99, 120, 123, 126, 144, 147, 150, 247, 250, 325, 328, 331, 334, 337, 370, 375, 378, 381, 384, 387, 407, 410, 432, 471, 474, 477, 550, 552, 557, 560, 563, 585, 588, 591, 624, 627, 698;
[0207] h. a primer pair, comprising a pair of isolated oligonucleotides having a sequence selected from the group consisting of SEQ ID NOs: 91-92, 94-95, 97-98, 121-122, 124-125, 142-143, 145-146, 148-149, 245-246, 248-249, 323-324, 326-327, 329-330, 332-333, 335-336, 371-372, 373-374, 376-377, 379-380, 382-383, 385-386, 405-406, 408-409, 430-431, 469-470, 472-473, 475-476, 548-549, 551 and 701, 553-554, 555-556, 558-559, 561-562, 583-584, 586-587, 589-590, 622-623, 699-700,

[0208] to detect differential expression of a splice variant according to the invention.

[0209] There is also optionally provided a method for monitoring disease progression and/or treatment efficacy and/or relapse of Marker-detectable disease, comprising detecting cells affected by Marker-detectable disease with a biomarker or an antibody or a method or assay according to any of the above embodiments.

[0210] There is also optionally provided a method for monitoring disease progression or treatment efficacy or relapse of a disease, comprising detecting cells affected by the disease using a marker selected from the group consisting of:
[0211] a. an amino acid sequence selected from the group consisting of SEQ ID NOs:84-90, 114-117, 139-141, 165-166, 239-244, 317-322, 364-369, 401-404, 427-429, 463-468, 542-547, 579-582, 619-621 or a homologue or fragment thereof;
[0212] b. an amino acid sequence corresponding to a bridge, edge portion, tail, or head having an amino acid sequence selected from the group consisting of SEQ ID NOs:628-684 or a homologue or fragment thereof;
[0213] c. a polynucleotide having a sequence selected from the group consisting of SEQ ID NOs:54-60, 100-103, 127-130, 151-153, 167-173, 251-260, 338-345, 388-392, 411-413, 433-438, 478-483, 564-567, 592-594 or a homologue or fragment thereof;
[0214] d. a polynucleotide comprising a node having a sequence selected from the group consisting of SEQ ID NOs:61-82, 104-111, 131-137, 154-163, 174-234, 261-315, 346-362, 393-399, 414-425, 439-462, 484-533, 568-578, 595-615;
[0215] e. an antibody capable of specifically binding to at least one epitope of an amino acid sequence selected from the group consisting of SEQ ID NOs: 84-90, 114-117, 139-141, 165-166, 239-244, 317-322, 364-369, 401-404, 427-429, 463-468, 542-547, 579-582, 619-621, 628-684;
[0216] f. an oligonucleotide having a sequence selected from the group consisting of SEQ ID NOs:10-26, 93, 96, 99, 120, 123, 126, 144, 147, 150, 247, 250, 325, 328, 331, 334, 337, 370, 375, 378, 381, 384, 387, 407, 410, 432, 471, 474, 477, 550, 552, 557, 560, 563, 585, 588, 591, 624, 627, 698;
[0217] g. a primer pair, comprising a pair of isolated oligonucleotides capable of amplifying an amplicon having a sequence selected from the group consisting of SEQ ID NOs: 93, 96, 99, 120, 123, 126, 144, 147, 150, 247, 250, 325, 328, 331, 334, 337, 370, 375, 378, 381, 384, 387, 407, 410, 432, 471, 474, 477, 550, 552, 557, 560, 563, 585, 588, 591, 624, 627, 698;
[0218] h. a primer pair, comprising a pair of isolated oligonucleotides having a sequence selected from the group consisting of SEQ ID NOs: 91-92, 94-95, 97-98, 121-122, 124-125, 142-143, 145-146, 148-149, 245-246, 248-249, 323-324, 326-327, 329-330, 332-333, 335-336, 371-372, 373-374, 376-377, 379-380, 382-383, 385-386, 405-406, 408-409, 430-431, 469-470, 472-473, 475-476, 548-549, 551 and 701, 553-554, 555-556, 558-559, 561-562, 583-584, 586-587, 589-590, 622-623, 699-700,

[0219] to detect differential expression of a splice variant according to the invention.

[0220] There is also optionally provided a method of selecting a therapy for a marker-detectable disease, comprising detecting cells affected by a marker-detectable disease with a biomarker or an antibody or a method or assay according to any of the above embodiments and selecting a therapy according to said detection.

[0221] There is also optionally provided a method of selecting a therapy for a disease, comprising detecting cells affected by the disease using a marker selected from the group consisting of:
[0222] a. an amino acid sequence selected from the group consisting of SEQ ID NOs:84-90, 114-117, 139-141, 165-166, 239-244, 317-322, 364-369, 401-404, 427-429, 463-468, 542-547, 579-582, 619-621 or a homologue or fragment thereof;
[0223] b. an amino acid sequence corresponding to a bridge, edge portion, tail, or head having an amino acid sequence selected from the group consisting of SEQ ID NOs:628-684 or a homologue or fragment thereof;
[0224] c. a polynucleotide having a sequence selected from the group consisting of SEQ ID NOs:54-60, 100-103, 127-130, 151-153, 167-173, 251-260, 338-345, 388-392, 411-413, 433-438, 478-483, 564-567, 592-594 or a homologue or fragment thereof;
[0225] d. a polynucleotide comprising a node having a sequence selected from the group consisting of SEQ ID NOs:61-82, 104-111, 131-137, 154-163, 174-234, 261-315, 346-362, 393-399, 414-425, 439-462, 484-533, 568-578, 595-615;
[0226] e. an antibody capable of specifically binding to at least one epitope of an amino acid sequence selected from the group consisting of SEQ ID NOs: 84-90, 114-117, 139-141, 165-166, 239-244, 317-322, 364-369, 401-404, 427-429, 463-468, 542-547, 579-582, 619-621, 628-684;
[0227] f. an oligonucleotide having a sequence selected from the group consisting of SEQ ID NOs:10-26, 93, 96, 99, 120, 123, 126, 144, 147, 150, 247, 250, 325, 328, 331, 334, 337, 370, 375, 378, 381, 384, 387, 407, 410, 432, 471, 474, 477, 550, 552, 557, 560, 563, 585, 588, 591, 624, 627, 698;
[0228] g. a primer pair, comprising a pair of isolated oligonucleotides capable of amplifying an amplicon having a sequence selected from the group consisting of SEQ ID NOs: 93, 96, 99, 120, 123, 126, 144, 147, 150, 247, 250, 325, 328, 331, 334, 337, 370, 375, 378, 381, 384, 387, 407, 410, 432, 471, 474, 477, 550, 552, 557, 560, 563, 585, 588, 591, 624, 627, 698;
[0229] h. a primer pair, comprising a pair of isolated oligonucleotides having a sequence selected from the group consisting of SEQ ID NOs: 91-92, 94-95, 97-98, 121-122, 124-125, 142-143, 145-146, 148-149, 245-246, 248-249, 323-324, 326-327, 329-330, 332-333, 335-336, 371-372, 373-374, 376-377, 379-380, 382-383, 385-386, 405-406, 408-409, 430-431, 469-470, 472-473, 475-476, 548-549, 551 and 701, 553-554, 555-556, 558-559, 561-562, 583-584, 586-587, 589-590, 622-623, 699-700,

[0230] to detect differential expression of a splice variant according to the invention and selecting a therapy according to said detection.

[0231] The method of any of the above claims may optionally be used when the marker-detectable disease is marker-detectable disease is cluster N56180 marker-detectable disease, cluster S67314 marker-detectable disease, cluster HUMNATPEP marker-detectable disease, cluster HUMCDDANF marker-detectable disease, cluster HSACMHCP marker-detectable disease, cluster HSCREACT marker-detectable disease, or cluster Z3624 marker-detectable disease, and is selected from the group consisting of variety of cardiac diseases. According to preferred embodiments of the present invention, cardiac disease and/or pathology and/or condition and/or disorder may comprise one or more of Myocardial infarct, acute coronary syndrome, angina pectoris (stable and unstable), cardiomyopathy, myocarditis, congestive heart failure or any type of heart failure, the detection of reinfarction, the detection of success of thrombolytic therapy after Myocardial infarct, Myocardial infarct after surgery, assessing the size of infarct in Myocardial infarct, the differential diagnosis of heart related conditions from lung related conditions (as pulmonary embolism), the differential diagnosis of Dyspnea, and cardiac valves related conditions.

[0232] Alternatively and optionally, the marker-detectable disease is cluster HUMGRP5E marker-detectable, cluster T94936 marker-detectable, or cluster HSTGFB1 marker-detectable disease and is selected from the group consisting of variety of cancers, including but not limited to colon cancer, breast cancer, ovarian cancer, lung cancer; and colon, breast, ovarian, and lung cancer invasion and metastasis.

[0233] Alternatively and optionally, the marker-detectable disease is cluster S57296 marker-detectable disease and is selected from the group consisting of variety of cancers, including but not limited to breast cancer, ovarian cancer, lung cancer; and breast, ovarian, and lung cancer invasion and metastasis.

[0234] Alternatively and optionally, the marker-detectable disease is cluster M78530 marker-detectable disease and is selected from the group consisting of variety of cancers, including but not limited to ovarian cancer and ovarian cancer invasion and metastasis.

[0235] According to preferred embodiments of the present invention, preferably any of the above nucleic acid and/or amino acid sequences further comprises any sequence having at least about 70%, preferably at least about 80%, more preferably at least about 90%, most preferably at least about 95% homology thereto.

[0236] Unless otherwise noted, all experimental data relates to variants of the present invention, named according to the segment being tested (as expression was tested through RT-PCR as described).

[0237] All nucleic acid sequences and/or amino acid sequences shown herein as embodiments of the present invention relate to their isolated form, as isolated polynucleotides (including for all transcripts), oligonucleotides (including for all segments, amplicons and primers), peptides (including for all tails, bridges, insertions or heads, optionally including other antibody epitopes as described herein) and/or polypeptides (including for all proteins). It should be noted that oligonucleotide and polynucleotide, or peptide and polypeptide, may optionally be used interchangeably.

[0238] With regard to markers suitable for detecting cardiac disease (including but not limited to HSCREACT), according to preferred embodiments of the present invention, cardiac disease and/or pathology and/or condition and/or disorder may comprise one or more of Myocardial infarct, acute coronary syndrome, angina pectoris (stable and unstable), cardiomyopathy, myocarditis, congestive heart failure or any type of heart failure, the detection of reinfarction, the detection of success of thrombolytic therapy after Myocardial infarct, Myocardial infarct after surgery, assessing the size of infarct in Myocardial infarct, the differential diagnosis of heart related conditions from lung related conditions (as pulmonary embolism), the differential diagnosis of Dyspnea, and cardiac valves related conditions.

[0239] For these embodiments, there are provided novel markers for cardiac disease that are both sensitive and accurate. Biomolecular sequences (amino acid and/or nucleic acid sequences) uncovered using the methodology of the present invention and described herein can be efficiently utilized as tissue or pathological markers and/or as drugs or drug targets for treating or preventing a disease.

[0240] These markers are specifically released to the bloodstream under conditions of cardiac disease and/or cardiac pathology, including but not limited to cardiac damage, and/or are otherwise expressed at a much higher level and/or specifically expressed in heart. The method of the present invention identifies clusters (genes) which are characterized in that the transcripts are differentially expressed in heart muscle tissue compared with other normal tissues, preferably in comparison to skeletal muscle tissue. In acute conditions under which heart muscle tissue experiences hypoxia (with or without necrosis), intracellular proteins that are not normally secreted can leak through the cell membrane to the extracellular space. Therefore, heart muscle tissue differentially expressed proteins, as through analysis of EST expression, are potential acute heart damage markers.

[0241] Leakage of intracellular content can also occur in chronic damage to the heart muscle, therefore proteins selected according to this method are potential markers for chronic heart conditions. When a protein that is differentially expressed in heart muscle is secreted, it is even more likely to be useful as a chronic heart damage marker, since secretion implies that the protein has a physiological role exterior to the cell, and therefore may be used by the heart muscle to respond to the chronic damage. This rationale is empirically supported by the non-limiting examples of the proteins BNP (brain natriuretic peptide) and ANF (atrial natriuretic factor), which are differentially expressed heart muscle proteins that are secreted and which were shown to be markers for congestive heart failure. In addition, BNP and ANF are not only differentially expressed in heart tissue, they are also overexpressed dramatically (hundreds of times greater expression) when heart failure occurs. Other heart specific secreted proteins might present similar overexpression in chronic damage.

[0242] Optionally and preferably, the markers described herein are overexpressed in heart as opposed to muscle, as described in greater detail below. The measurement of these markers, alone or in combination, in patient samples provides information that the diagnostician can correlate with a probable diagnosis of cardiac disease and/or cardiac pathology, including but not limited to cardiac damage.

[0243] The present invention therefore also relates to diagnostic assays for cardiac disease and/or cardiac pathology, including but not limited to cardiac damage, and methods of use of such markers for detection of cardiac disease and/or cardiac pathology, including but not limited to cardiac damage (alone or in combination), optionally and preferably in a sample taken from a subject (patient), which is more preferably some type of blood sample.

[0244] The present invention therefore also relates to diagnostic assays for cardiac disease and/or cardiac pathology, including but not limited to cardiac damage, and methods of use of such markers for detection of cardiac disease and/or cardiac pathology, including but not limited to cardiac damage (alone or in combination), optionally and preferably in a sample taken from a subject (patient), which is more preferably some type of blood sample.

[0245] The above description for cardiac pathology and diagnostic utilities optionally and preferably apply to markers (variants) according to the present invention that are described as being useful for cardiac related diagnostic utilities. More generally, such markers are useful for cardiovascular and cerebrovascular conditions, which are conditions that affect the vascular system, including various cardiovascular and cerebrovascular conditions. As described in greater detail below, these conditions may also optionally include stroke and various cardiomyopathies.

[0246] Unless defined otherwise, all technical and scientific terms used herein have the meaning commonly understood by a person skilled in the art to which this invention belongs. The following references provide one of skill with a general definition of many of the terms used in this invention: Singleton et al., Dictionary of Microbiology and Molecular Biology (2nd ed. 1994); The Cambridge Dictionary of Science and Technology (Walker ed., 1988); The Glossary of Genetics, 5th Ed., R. Rieger et al. (eds.), Springer Verlag (1991); and Hale & Marham, The Harper Collins Dictionary of Biology (1991). All of these are hereby incorporated by reference as if fully set forth herein. As used herein, the following terms have the meanings ascribed to them unless specified otherwise.

### BRIEF DESCRIPTION OF DRAWINGS

[0247] FIG. 1 shows schematic summary of the cancer biomarkers selection engine and the following wet validation stages.

[0248] FIG. 2 shows schematic illustration, depicting grouping of transcripts of a given cluster based on presence or absence of unique sequence regions.

[0249] FIG. 3 shows schematic presentation of the oligonucleotide based microarray fabrication.

[0250] FIG. 4 schematic summary of the oligonucleotide based microarray experimental flow.

[0251] FIG. 5 shows schematic summary of quantitative real-time PCR analysis.

[0252] FIG. 6 is a histogram showing differential expression for cluster N56180 in heart vs. other tissues.

[0253] FIG. 7 is a histogram showing expression of oligonucleotides in various tissues, including heart for cluster N56180 using Affimetrix probe 207317_s_at.

[0254] FIG. 8 is a histogram showing expression of Homo sapiens calsequestrin 2 N56180 transcripts which are detectable by amplicon as depicted in sequence name N56180 seg33-34 (SEQ ID NO:93) specifically in heart tissue.

[0255] FIG. 9 is a histogram showing expression of Calsequestrin 2 transcripts which are detectable by amplicon as depicted in sequence name N56180seg22 (SEQ ID NO: 96) specifically in heart tissue.

[0256] FIG. 10 is a histogram showing expression of Calsequestrin 2 transcripts which are detectable by amplicon as depicted in sequence name N56180seg6 (SEQ ID NO: 99) specifically in heart tissue.

[0257] FIG. 11 is a histogram showing differential expression for cluster S67314 in heart vs. other tissues.

[0258] FIG. 12 is a histogram showing expression of oligonucleotides in various tissues, including heart for cluster S67314 using Affimetrix probe 205738_s_at.

[0259] FIG. 13 is a histogram showing expression of oligonucleotides in various tissues, including heart for cluster S67314 using Affimetrix probe 214285_at.

[0260] FIG. 14 is a histogram showing expression of Fatty acid-binding protein (SEQ ID NO:112) transcripts which are detectable by amplicon as depicted in sequence name S67314seg11 (SEQ ID NO: 120) specifically in heart tissue.

[0261] FIG. 15 is a histogram showing expression of Fatty acid-binding protein (SEQ ID NO:112) S67314 transcripts, which are detectable by amplicon as depicted in sequence name S67314 seg15 (SEQ ID NO:123) specifically in heart tissue.

[0262] FIG. 16 is a histogram showing Expression of Fatty acid-binding protein (SEQ ID NO:112) S67314 transcripts which are detectable by amplicon as depicted in sequence name S67314seg4 (SEQ ID NO: 126) specifically in heart tissue.

[0263] FIG. 17 is a histogram showing differential expression for cluster HUMNATPEP in heart vs. other tissues.

[0264] FIG. 18 is a histogram showing expression of oligonucleotides in various tissues, including heart for cluster HUMNATPEP using Affimetrix probe 206801_at.

[0265] FIG. 19 is histogram showing expression of Homo sapiens natriuretic peptide precursor B (NPPB) HUMNATPEP transcripts which are detectable by amplicon as depicted in sequence name HUMNATPEP seg3-4WT (SEQ ID NO: 144) specifically in heart tissue.

[0266] FIG. 20 is a histogram showing expression of ANFB_HUMAN (SEQ ID NO:138) Natriuretic peptide HUMNATPEP transcripts which are detectable by amplicon as depicted in sequence name HUMNATPEP seg2 (SEQ ID NO: 147) specifically in heart tissue.

[0267] FIG. 21 is a histogram showing expression of ANFB_HUMAN (SEQ ID NO:138) Natriuretic peptides HUMNATPEP transcripts which are detectable by amplicon as depicted in sequence name HUMNATPEPseg5 (SEQ ID NO: 150) specifically in heart tissue.

[0268] FIG. 22 is a histogram showing differential expression for cluster HUMCDDANF in heart vs. other tissues.

[0269] FIG. 23 is a histogram showing expression of oligonucleotides in various tissues, including heart for cluster HUMCDDANF using Affimetrix probe 209957_s_at.

[0270] FIG. 24 is a histogram showing differential expression for cluster HSACMHCP in heart vs. other tissues.

[0271] FIG. 25 is a histogram showing expression of oligonucleotides in various tissues, including heart for cluster HSACMHCP using Affimetrix probe 204737_s_at.

[0272] FIG. 26 is a histogram showing expression of oligonucleotides in various tissues, including heart for cluster HSACMHCP using Affimetrix probe 216265_x_at.

[0273] FIG. 27 is a histogram showing expression of Homo sapiens myosin, heavy polypeptide 6, HSACMHCP transcripts which are detectable by amplicon as depicted in sequence name HSACMHCP seg106 (SEQ ID NO: 247) specifically in heart tissue.

[0274] FIG. 28 is a histogram showing expression of HSACMHCP transcripts which are detectable by amplicon as depicted in sequence name HSACMHCP seg46 (SEQ ID NO:250) specifically in heart tissue

[0275] FIGS. 29a and 29b are histograms showing on two different scales the expression of Homo sapiens C-reactive protein, pentraxin-related (CRP) HSCREACT transcripts which are detectable by amplicon as depicted in sequence name HSCREACT junc11-53F2R2 (SEQ ID NO:325) in different normal tissues.

[0276] FIGS. 30a and 30b are histograms showing on two different scales the expression of Homo sapiens C-reactive protein, pentraxin-related (CRP) HSCREACT transcripts which are detectable by amplicon as depicted in sequence name HSCREACT junc12-30F2R2 (SEQ ID NO:328) in different normal tissues.

[0277] FIGS. 31a and 31b are histograms showing on two different scales the expression of Homo sapiens C-reactive protein, pentraxin-related (CRP) HSCREACT transcripts which are detectable by amplicon as depicted in sequence name HSCREACT junc12-53F2R2 (SEQ ID NO:331) in different normal tissues.

[0278] FIG. 32 is a histogram showing expression of Homo sapiens C-reactive protein, pentraxin-related (CRP) HSCREACT transcripts which are detectable by amplicon as depicted in sequence name HSCREACT junc24-47F2R2 (SEQ ID NO:334) in different normal tissues.

[0279] FIG. 33 is a histogram showing expression of Homo sapiens C-reactive protein, pentraxin-related (CRP) HSCREACT transcripts which are detectable by amplicon as depicted in sequence name HSCREACT seg8-11 (SEQ ID NO: 337) in different normal tissues.

[0280] FIG. 34 is a histogram showing Cancer and cell-line vs. normal tissue expression for Cluster HSSTROL3, demonstrating overexpression in transitional cell carcinoma, epithelial malignant tumors, a mixture of malignant tumors from different tissues and pancreas carcinoma.

[0281] FIG. 35 is a histogram showing Expression of Homo sapiens matrix metalloproteinase 11 (stromelysin 3) (MMP11) HSSTROL3 transcripts which are detectable by amplicon as depicted in sequence name HSSTROL3 junc211-26 (SEQ ID NO:370) in normal and cancerous breast tissues.

[0282] FIG. 36 is a histogram showing expression of Homo sapiens matrix metalloproteinase 11 (stromelysin 3) (MMP11) HSSTROL3 transcripts which are detectable by amplicon as depicted in sequence name HSSTROL3 junc21-26 (SEQ ID NO:370) in normal and cancerous colon tissues.

[0283] FIG. 37 is a histogram showing expression of Homo sapiens matrix metalloproteinase 11 (stromelysin 3) (MMP11) HSSTROL3 transcripts which are detectable by amplicon as depicted in sequence name HSSTROL3 junc21-26 (SEQ ID NO:370) in normal and cancerous lung tissues.

[0284] FIG. 38 is a histogram showing expression of Homo sapiens matrix metalloproteinase 11 (stromelysin 3) (MMP11) HSSTROL3 transcripts which are detectable by amplicon as depicted in sequence name HSSTROL3 junc21-26 (SEQ ID NO:370) in different normal tissues.

[0285] FIG. 39 is a histogram showing expression of Homo sapiens matrix metalloproteinase 11 (stromelysin 3) (MMP11) HSSTROL3 transcripts which are detectable by amplicon as depicted in sequence name HSSTROL3 junc21-26 (SEQ ID NO:370) in normal and cancerous ovary tissues.

[0286] FIG. 40 is a histogram showing expression of Homo sapiens matrix metalloproteinase 11 (stromelysin 3) (MMP11) HSSTROL3 transcripts which are detectable by amplicon as depicted in sequence name HSSTROL3 junc21-27 (SEQ ID NO: 378) in normal and cancerous ovary tissues

[0287] FIG. 41 is a histogram showing expression of Stromelysin-3 precursor (SEQ ID NO:363) (EC 3.4.24.-) (Matrix metalloproteinase-11) (MMP-11) (ST3) (SL-3) HSSTROL3 transcripts which are detectable by amplicon as depicted in sequence name HSSTROL3 junc21-27 (SEQ ID NO: 378) in normal and cancerous breast tissues

[0288] FIG. 42 is a histogram showing expression of Homo sapiens matrix metalloproteinase 11 (stromelysin 3) (MMP11) HSSTROL3 transcripts which are detectable by amplicon as depicted in sequence name HSSTROL3 junc21-27 (SEQ ID NO: 378) in normal and cancerous colon tissues.

[0289] FIG. 43 is a histogram showing expression of Homo sapiens matrix metalloproteinase 11 (stromelysin 3) (MMP11) HSSTROL3 transcripts which are detectable by amplicon as depicted in sequence name HSSTROL3 junc21-27 (SEQ ID NO: 378) in normal and cancerous lung tissues.

[0290] FIG. 44 is a histogram showing expression of Stromelysin-3 precursor (SEQ ID NO:363) HSSTROL3 transcripts which are detectable by amplicon as depicted in sequence name HSSTROL3 junc21-27 (SEQ ID NO: 378) in different normal tissues.

[0291] FIG. 45 is a histogram showing expression of Homo sapiens matrix metalloproteinase 11 HSSTROL3 transcripts which are detectable by amplicon as depicted in sequence name HSSTROL3 seg20-21 (SEQ ID NO:381) in normal and cancerous colon tissues.

[0292] FIG. 46 is a histogram showing expression of Homo sapiens matrix metalloproteinase 11 (stromelysin 3) (MMP11) HSSTROL3 transcripts which are detectable by amplicon as depicted in sequence name HSSTROL seg20-21 (SEQ ID NO: 560) in normal and cancerous ovary tissues.

[0293] FIG. 47 is a histogram showing expression of Stromelysin-3 precursor (SEQ ID NO:363) HSSTROL3 transcripts which are detectable by amplicon as depicted in sequence name HSSTROL3 seg20-21 (SEQ ID NO:381) in normal and cancerous Prostate tissues.

[0294] FIG. 48 is a histogram showing expression of Homo sapiens matrix metalloproteinase 11 HSSTROL3 transcripts which are detectable by amplicon as depicted in sequence name HSSTROL3 seg20-21 (SEQ ID NO:381) in normal and cancerous lung tissues.

[0295] FIG. 49 is a histogram showing expression of Stromelysin-3 precursor (SEQ ID NO:363) HSSTROL3 transcripts which are detectable by amplicon as depicted in sequence name HSSTROL3 junc20-21 in normal and cancerous breast tissues.

[0296] FIG. 50 is a histogram showing Expression of Stromelysin-3 precursor (SEQ ID NO:363) HSSTROL3 transcripts which are detectable by amplicon as depicted in sequence name HSSTROL3 seg24 (SEQ ID NO:384) in normal and cancerous breast tissues

[0297] FIG. 51 is a histogram showing Expression of Stromelysin-3 precursor (SEQ ID NO:363) HSSTROL3 transcripts which are detectable by amplicon as depicted in sequence name HSSTROL3 seg24 (SEQ ID NO:384) in normal and cancerous lung tissues.

[0298] FIG. 52 is a histogram showing expression of Stromelysin-3 precursor (SEQ ID NO:363) HSSTROL3 transcripts which are detectable by amplicon as depicted in sequence name HSSTROL3 seg24 (SEQ ID NO:384) in different normal tissues.

[0299] FIG. 53 is a histogram showing expression of Stromelysin-3 precursor (SEQ ID NO:363) transcripts which are detectable by amplicon as depicted in sequence name HSSTROL3 seg24 (SEQ ID NO:384) in normal and cancerous Prostate tissues.

[0300] FIG. 54 is a histogram showing expression of Homo sapiens matrix metalloproteinase 11 HSSTROL3 transcripts which are detectable by amplicon as depicted in sequence name HSSTROL3 seg25 (SEQ ID NO:387) in normal and cancerous colon tissues.

[0301] FIG. 55 is a histogram showing expression of Stromelysin-3 precursor (SEQ ID NO:363) HSSTROL3 transcripts which are detectable by amplicon as depicted in sequence name HSSTROL3 seg25 (SEQ ID NO:387) in normal and cancerous breast tissues.

[0302] FIG. 56 is a histogram showing Expression of Homo sapiens matrix metalloproteinase 11 HSSTROL3 transcripts which are detectable by amplicon as depicted in sequence name HSSTROL3 seg25 (SEQ ID NO:387) in normal and cancerous lung tissues.

[0303] FIG. 57 is a histogram showing expression of Stromelysin-3 precursor (SEQ ID NO:363) transcripts which are detectable by amplicon as depicted in sequence name HSSTROL3 seg25 (SEQ ID NO:387) in normal and cancerous Prostate tissues.

[0304] FIG. 58 is a histogram showing Expression of Homo sapiens gastrin-releasing peptide (GRP) HUMGRP5E transcripts which are detectable by amplicon as depicted in sequence name HUMGRP5E seg2 (SEQ ID NO:407) in normal and cancerous lung tissues.

[0305] FIG. 59 is a histogram showing expression of Homo sapiens gastrin-releasing peptide (GRP) HUMGRP5E transcripts which are detectable by amplicon as depicted in sequence name HUMGRP5E seg2 (SEQ ID NO:407) in different normal tissues.

[0306] FIG. 60 is a histogram showing expression of Homo sapiens gastrin-releasing peptide (GRP) HUMGRP5E transcripts which are detectable by amplicon as depicted in sequence name HUMGRP5E seg2 (SEQ ID NO:407) in normal and cancerous breast tissues.

[0307] FIG. 61 is a histogram showing expression of Homo sapiens gastrin-releasing peptide (GRP) HUMGRP5E transcripts which are detectable by amplicon as depicted in sequence name HUMGRP5E seg2 (SEQ ID NO:407) in normal and cancerous ovary tissues.

[0308] FIG. 62 is a histogram showing expression of GRP_HUMAN (SEQ ID NO:400)—gastrin-releasing peptide (HUMGRP5E) transcripts, which are detectable by amplicon, as depicted in sequence name HUMGRP5Ejunc3-7 (SEQ ID NO: 410) in normal and cancerous breast tissues.

[0309] FIG. 63 is a histogram showing expression of GRP_HUMAN (SEQ ID NO:400)—gastrin-releasing peptide HUMGRP5E transcripts, which are detectable by amplicon as depicted in sequence name HUMGRP5E junc3-7 (SEQ ID NO: 410) in normal and cancerous ovary tissues.

[0310] FIG. 64 is a histogram showing expression of GRP_HUMAN (SEQ ID NO:400)—gastrin-releasing peptide HUMGRP5E transcripts, which are detectable by amplicon as depicted in sequence name HUMGRP5Ejunc3-7 (SEQ ID NO: 410) in normal and cancerous lung tissues.

[0311] FIG. 65 is a histogram showing expression of GRP_HUMAN (SEQ ID NO:400)—gastrin-releasing peptide HUMGRP5E transcripts, which are detectable by amplicon as depicted in sequence name HUMGRP5E junc3-7 (SEQ ID NO: 410) in different normal tissues.

[0312] FIG. 66 is a histogram showing expression of Homo sapiens breast cancer membrane protein 11 (BCMP11) T94936 transcripts which are detectable by amplicon as depicted in sequence name T94936 seg14 (SEQ ID NO: 563) in different normal tissues.

[0313] FIG. 67 is a histogram showing expression of Homo sapiens breast cancer membrane protein 11 (BCMP11) T94936 transcripts which are detectable by amplicon as depicted in sequence name T94936 seg14 (SEQ ID NO: 563) in normal and cancerous breast tissues.

[0314] FIG. 68 is a histogram showing expression of Homo sapiens breast cancer membrane protein 11 (BCMP11) T94936 transcripts which are detectable by amplicon as depicted in sequence name T94936 seg14 (SEQ ID NO: 563) in normal and cancerous ovary tissues.

[0315] FIG. 69 is a histogram showing expression of Homo sapiens breast cancer membrane protein 11 (BCMP11) T94936 transcripts which are detectable by amplicon as depicted in sequence name T94936 seg20 (SEQ ID NO: 432) in normal and cancerous ovary tissues.

[0316] FIG. 70 is a histogram showing expression of Homo sapiens breast cancer membrane protein 11 (BCMP11) T94936 transcripts which are detectable by amplicon as depicted in sequence name T94936 seg20 (SEQ ID NO: 432) in normal and cancerous breast tissues.

[0317] FIG. 71 is a histogram showing expression of Homo sapiens breast cancer membrane protein 11 (BCMP11) T94936 transcripts which are detectable by amplicon as depicted in sequence name T94936 seg20 (SEQ ID NO: 432) in different normal tissues.

[0318] FIG. 72 is a histogram showing Cancer and cell-line vs. normal tissue expression for Cluster HSTGFB1, demonstrating overexpression in epithelial malignant tumors, kidney malignant tumors, pancreas carcinoma and skin malignancies.

[0319] FIG. 73 is a histogram showing Expression of transforming growth factor, beta 1 (HSTGFB1) transcripts which are detectable by amplicon as depicted in sequence name HSTGFB1junc14-22-23 (SEQ ID NO: 474) in different normal tissues.

[0320] FIG. 74 is a histogram showing Expression of transforming growth factor, beta 1 (HSTGFB1) transcripts which are detectable by amplicon as depicted in sequence name HSTGFB1seg14-15 (SEQ ID NO: 471) in different normal tissues.

[0321] FIG. 75 is a histogram showing Expression of transforming growth factor, beta 1 (HSTGFB1) transcripts which are detectable by amplicon as depicted in sequence name HSTGFB1 seg7WT (SEQ ID NO:477) in different normal tissues.

[0322] FIG. 76 is a histogram showing expression of transforming growth factor, beta 1 transcripts which are detectable by HSTGFB1 seg 15, in normal and cancerous breast tissues.

[0323] FIG. 77 is a histogram showing Cancer and cell-line vs. normal tissue expression for Cluster S57296, demonstrating overexpression in a mixture of malignant tumors from different tissues, uterine malignancies, breast malignant tumors and epithelial malignant tumors.

[0324] FIG. 78 is a histogram showing Expression of Homo sapiens v-erb-b2 S57296 transcripts which are detectable by amplicon as depicted in sequence name S57296-B2Lnew seg58-59 (SEQ ID NO: 550) in normal and cancerous breast tissues.

[0325] FIG. 79 is a histogram showing expression of Homo sapiens v-erb-b2 S57296 transcripts which are detectable by amplicon as depicted in sequence name S57296 B2S seg-44 (SEQ ID NO: 552) in different normal tissues.

[0326] FIG. 80 is a histogram showing expression of Homo sapiens v-erb-b2 S57296 transcripts which are detectable by amplicon as depicted in sequence name S57296 B2Lnew seg58-59 (SEQ ID NO: 550) in different normal tissues.

[0327] FIG. 81 is a histogram showing expression of Homo sapiens v-erb-b2 S57296 transcripts which are detectable by amplicon as depicted in sequence name S57296WT seg63 (SEQ ID NO:497) in different normal tissues.

[0328] FIG. 82 is a histogram showing Expression of Homo sapiens v-erb-b2 S57296 transcripts which are detectable by amplicon as depicted in sequence name S57296WT seg63 (SEQ ID NO:497) in normal and cancerous breast tissues.

[0329] FIG. 83 is a histogram showing expression of Homo sapiens v-erb-b2 S57296 transcripts which are detectable by amplicon as depicted in sequence name S57296 B2S seg-44 (SEQ ID NO: 552) in normal and cancerous breast tissues.

[0330] FIG. 84 is a histogram showing combined expression of 4 sequences—S57296 B2S seg-44 (SEQ ID NO: 552), S57296 B2Lnew seg58-59 (SEQ ID NO: 550), HSSTROL seg20-21 (SEQ ID NO: 560), T94936 seg14 (SEQ ID NO: 563) in normal and cancerous breast tissues.

[0331] FIG. 85 is a histogram showing differential expression for cluster Z36249 in heart vs. other tissues.

[0332] FIG. 86 is a histogram showing expression of oligonucleotides in various tissues, including heart for cluster Z36249 using Affimetrix probe 206029_at.

[0333] FIG. 87 is a histogram showing expression of Homo sapiens ankyrin repeat domain 1 (cardiac muscle) Z36249 transcripts which are detectable by amplicon as depicted in sequence name Z36249 seg11-12 (SEQ ID NO:585) specifically in heart tissue.

[0334] FIG. 88 is a histogram showing Expression of Homo sapiens ankyrin repeat domain 1 (cardiac muscle) Z36249 transcripts which are detectable by amplicon as depicted in sequence name Z36249 seg14-16 (SEQ ID NO:588) specifically in heart tissue.

[0335] FIG. 89 is a histogram showing expression of Homo sapiens ankyrin repeat domain 1 (cardiac muscle) Z36249 transcripts which are detectable by amplicon as depicted in sequence name Z36249 junc23-25 (SEQ ID NO:591) specifically in heart tissue

[0336] FIG. 90 is a histogram showing Cancer and cell-line vs. normal tissue expression for Cluster M78530, demonstrating overexpression in ovarian carcinoma.

[0337] FIG. 91 is a histogram showing expression of Spondin 1 M78530 transcripts which are detectable by amplicon as depicted in sequence name M78530 seg37 (SEQ ID NO: 624) in normal and cancerous ovary tissues.

[0338] FIG. 92 is a histogram showing expression of Spondin 1 M78530 transcripts which are detectable by amplicon as depicted in sequence name M78530 seg40WT (SEQ ID NO: 627) in normal and cancerous ovary tissues.

[0339] FIG. 93 is a histogram showing Expression of spondin 1 transcripts which are detectable by junction of segments 2-4, in normal, benign and cancerous ovary tissues.

### DESCRIPTION OF PREFERRED EMBODIMENTS

[0340] The present invention provides variants, which may optionally be used as diagnostic markers.

[0341] Preferably these variants are useful as diagnostic markers for marker-detectable (also referred to herein as “variant-detectable”) diseases as described herein.

[0342] Differential variant markers are collectively described as “variant disease markers”.

[0343] The markers of the present invention, alone or in combination, can be used for prognosis, prediction, screening, early diagnosis, staging, therapy selection and treatment monitoring of a marker-detectable disease. For example, optionally and preferably, these markers may be used for staging the disease in patient (for example if the disease features cancer) and/or monitoring the progression of the disease. Furthermore, the markers of the present invention, alone or in combination, can be used for detection of the source of metastasis found in anatomical places other than the originating tissue, again in the example of cancer. Also, one or more of the markers may optionally be used in combination with one or more other disease markers (other than those described herein).

[0344] Biomolecular sequences (amino acid and/or nucleic acid sequences) uncovered using the methodology of the present invention and described herein can be efficiently utilized as tissue or pathological markers and/or as drugs or drug targets for treating or preventing a disease.

[0345] These markers are specifically released to the bloodstream under conditions of a particular disease, and/or are otherwise expressed at a much higher level and/or specifically expressed in tissue or cells afflicted with or demonstrating the disease. The measurement of these markers, alone or in combination, in patient samples provides information that the diagnostician can correlate with a probable diagnosis of a particular disease and/or a condition that is indicative of a higher risk for a particular disease.

[0346] The present invention therefore also relates to diagnostic assays for marker-detectable disease and/or an indicative condition, and methods of use of such markers for detection of marker-detectable disease and/or an indicative condition, optionally and preferably in a sample taken from a subject (patient), which is more preferably some type of blood sample.

[0347] Information given in the text with regard to cellular localization was determined according to four different software programs: (i) tmhmm (from Center for Biological Sequence Analysis, Technical University of Denmark DTU, http://www.cbs.dtu.dk/services/TMHMM/TMHMM2.0b.guide.php) or (ii) tmpred (from EMBnet, maintained by the ISREC Bionformatics group and the LICR Information Technology Office, Ludwig Institute for Cancer Research, Swiss Institute of Bioinformatics, http://www.ch.embnet.org/software/TMPRED_form.html) for transmembrane region prediction; (iii) signalp_hmm or (iv) signalp_nn (both from Center for Biological Sequence Analysis, Technical University of Denmark DTU, http://www.cbs.dtu.dk/services/SignalP/background/prediction.php) for signal peptide prediction. The terms “signalp_hmm” and “signalp_nn” refer to two modes of operation for the program SignalP: hmm refers to Hidden Markov Model, while nn refers to neural networks. Localization was also determined through manual inspection of known protein localization and/or gene structure, and the use of heuristics by the individual inventor. In some cases for the manual inspection of cellular localization prediction inventors used the ProLoc computational platform [Einat Hazkani-Covo, Erez Levanon, Galit Rotman, Dan Graur and Amit Novik; (2004) “Evolution of multicellularity in metazoa: comparative analysis of the subcellular localization of proteins in Saccharomyces, Drosophila and Caenorhabditis.” Cell Biology International 2004; 28(3):171-8.], which predicts protein localization based on various parameters including, protein domains (e.g., prediction of trans-membranous regions and localization thereof within the protein), pI, protein length, amino acid composition, homology to pre-annotated proteins, recognition of sequence patterns which direct the protein to a certain organelle (such as, nuclear localization signal, NLS, mitochondria localization signal), signal peptide and anchor modeling and using unique domains from Pfam that are specific to a single compartment.

[0348] Information is given in the text with regard to SNPs (single nucleotide polymorphisms). A description of the abbreviations is as follows. “T->C”, for example, means that the SNP results in a change at the position given in the table from T to C. Similarly, “M->Q”, for example, means that the SNP has caused a change in the corresponding amino acid sequence, from methionine (M) to glutamine (Q). If, in place of a letter at the right hand side for the nucleotide sequence SNP, there is a space, it indicates that a frameshift has occurred. A frameshift may also be indicated with a hyphen (-). A stop codon is indicated with an asterisk at the right hand side (*). As part of the description of an SNP, a comment may be found in parentheses after the above description of the SNP itself. This comment may include an FTId, which is an identifier to a SwissProt entry that was created with the indicated SNP. An FTId is a unique and stable feature identifier, which allows construction of links directly from position-specific annotation in the feature table to specialized protein-related databases. The FTId is always the last component of a feature in the description field, as follows: FTId=XXX_number, in which XXX is the 3-letter code for the specific feature key, separated by an underscore from a 6-digit number. In the table of the amino acid mutations of the wild type proteins of the selected splice variants of the invention, the header of the first column is “SNP position(s) on amino acid sequence”, representing a position of a known mutation on amino acid sequence. SNPs may optionally be used as diagnostic markers according to the present invention, alone or in combination with one or more other SNPs and/or any other diagnostic marker. Preferred embodiments of the present invention comprise such SNPs, including but not limited to novel SNPs on the known (WT or wild type) protein sequences given below, as well as novel nucleic acid and/or amino acid sequences formed through such SNPs, and/or any SNP on a variant amino acid and/or nucleic acid sequence described herein.

[0349] Information given in the text with regard to the Homology to the known proteins was determined by Smith-Waterman version 5.1.2 using special (non default) parameters as follows:

[0350] model=sw.model

[0351] GAPEXT=0

[0352] GAPOP=100.0
[0353] MATRIX=blosum100

[0354] Information is given with regard to overexpression of a cluster in cancer based on ESTs. A key to the p values with regard to the analysis of such overexpression is as follows:
[0355] library-based statistics: P-value without including the level of expression in cell-lines (P1)
[0356] library based statistics: P-value including the level of expression in cell-lines (P2)
[0357] EST clone statistics: P-value without including the level of expression in cell-lines (SP1)
[0358] EST clone statistics: predicted overexpression ratio without including the level of expression in cell-lines (R3)
[0359] EST clone statistics: P-value including the level of expression in cell-lines (SP2)
[0360] EST clone statistics: predicted overexpression ratio including the level of expression in cell-lines (R4)

[0361] Library-based statistics refer to statistics over an entire library, while EST clone statistics refer to expression only for ESTs from a particular tissue or cancer.

[0362] Information is given with regard to overexpression of a cluster in cancer based on microarrays. As a microarray reference, in the specific segment paragraphs, the unabbreviated tissue name was used as the reference to the type of chip for which expression was measured. There are two types of microarray results: those from microarrays prepared according to a design by the present inventors, for which the microarray fabrication procedure is described in detail in Materials and Experimental Procedures section herein; and those results from microarrays using Affymetrix technology. As a microarray reference, in the specific segment paragraphs, the unabbreviated tissue name was used as the reference to the type of chip for which expression was measured. For microarrays prepared according to a design by the present inventors, the probe name begins with the name of the cluster (gene), followed by an identifying number. Oligonucleotide microarray results taken from Affymetrix data were from chips available from Affymetrix Inc, Santa Clara, Calif., USA (see for example data regarding the Human Genome U133 (HG-U133) Set at www.affymetrix.com/products/arrays/specific/hgu133.affx; GeneChip Human Genome U133A 2.0 Array at www.affymetrix.com/products/arrays/specific/hgu133av2.affx; and Human Genome U133 Plus 2.0 Array at www.affymetrix.com/products/arrays/specific/hgu133plus.affx). The probe names follow the Affymetrix naming convention. The data is available from NCBI Gene Expression Omnibus (see www.ncbi.nlm.nih.gov/projects/geo/ and Edgar et al, Nucleic Acids Research, 2002, Vol. 30, No. 1 207-210). The dataset (including results) is available from www.ncbi.nlm.nih.gov/geo/query/acc.cgi?acc=GSE1133 for the Series GSE1133 database (published on March 2004); a reference to these results is as follows: Su et al (Proc Natl Acad Sci USA. 2004 Apr. 20; 101(16):6062-7. Epub 2004 Apr. 9).

Oligonucleotide probes for use with arrays designed by the present inventors:

>S67314_0_0_741 (SEQ ID NO:17)

(SEQ ID NO:685)

CACAGAGCCAGGATGTTCTTCTGACCTCAGTATCTACTCCAGCTCCAGCT
>S67314_0_0_744 (SEQ ID NO:18)

(SEQ ID NO:686)

TGGCATGCTGGAACATGGACTCTAGCTAGCAAGAAGGGCTCAAGGAGGTG
>HSPROSAP_0_0_11823 (SEQ ID NO:19)

(SEQ ID NO:687)

CCTCTGGGGTAGGTTACTATCCTCTTTGTCCTGCCAGTACCCCTAGAAAT
>HSPROSAP_0_9_0 (SEQ ID NO:20)

(SEQ ID NO:688)

TTGGTGTTTCGGCATGGAGACCGAAGTCCCATTGACACCTTTCCCACTGA
>D11581_0_0_2570 (SEQ ID NO:21)

(SEQ ID NO:689)

ATGAGGGGAGATTGCCTTCCACTACACATAAGTATGGTCAAGTATGAAAT
>HSMUC1A_0_37_0 (SEQ ID NO:22)

(SEQ ID NO:690)

AAAAGGAGACTTCGGCTACCCAGAGAAGTTCAGTGCCCAGCTCTACTGAG
>HSMUC1A_0_0_11364 (SEQ ID NO:23)

(SEQ ID NO:691)

AAAGGCTGGCATAGGGGGAGGTTTCCCAGGTAGAAGAAGAAGTGTCAGCA
>HSMUC1A_0_0_11365 (SEQ ID NO:24)

(SEQ ID NO:692)

AATTAACCCTTTGAGAGCTGGCCAGGACTCTGGACTGATTACCCCAGCCT
>HSAPHOL_0_11_0 (SEQ ID NO:25)

(SEQ ID NO:25)

GGAACATTCTGGATCTGACCCTCCCAGTCTCATCTCCTGACCCTCCCACT
>HSCREACT_0_31_0 (SEQ ID NO:26)

(SEQ ID NO:630)

CCTCCCCTTTTCCACACGAACCTTGTGGGGCTGTGAATTCTTTCTTCATC
>HUMGRP5E_0_0_16630 (SEQ ID NO:10)
GCTGATATGGAAGTTGGGGAATCTGAATTGCCAGAGAATCTTGGGAAGAG
>HUMGRP5E_0_2_0 (SEQ ID NO:11)
TCTCATAGAAGCAAAGGAGAACAGAAACCACCAGCCACCTCAACCCAAGG
>M78530_0_6_0 (SEQ ID NO:12)
CTTCCTACACACATCTAGACGTTCAAGTTTGCAAATCAGTTTTTAGCAAG

[0363] In the heart specific clusters, a first set of abbreviations is used for the first histogram

ADP=adipocyte
BLD=blood
BLDR=bladder
BRN=brain
BONE=bone
BM=bone marrow
BRS=mammary gland
CAR=cartilage
CNS=central nervous system
COL=colon
E-ADR=endocrine_adrenal_gland
E-PAN=endocrine_pancreas
E-PT=endocrine_parathyroid_thyroid
ENDO=endocrine_unchar
EPID=epididymis
GI=gastrointestinal tract
GU=genitourinary
HN=head and neck
HRT=heart
KD=kidney
LI=liver
LUNG=lung
LN=lymph node
MUS=muscle
OV=ovary
PNS=peripheral nervous system
PRO=prostate
SKIN=skin
SPL=spleen
SYN=synovial membrane
TCELL=immune T cells
THYM=thymus
TST=testes
UTER=cervix-uterus
VAS=vascular

[0364] In the second histogram(s) of the heart paragraph, the oligo-probe names are abbreviated/enumerated as follows:

| | |
|---|---|
| “adipocyte”, | “A1”; |
| “adrenalcortex”, | “A2”; |
| “adrenalgland”, | “A3”; |
| “amygdala”, | “A4”; |
| “appendix”, | “A5”; |
| “atrioventricularnode”, | “A6”; |
| “bm_cd105_endothelial”, | “E1”; |
| “bm_cd33_myeloid”, | “M1”; |
| “bm_cd34_”, | “B1”; |
| “bm_cd71_earlyerythroid”, | “E1”; |
| “bonemarrow”, | “B2”; |
| “bronchialepithelialcells”, | “B3”; |
| “cardiacmyocytes”, | “C1”; |
| “caudatenucleus”, | “C2”; |
| “cerebellum”, | “C3”; |
| “cerebellumpeduncles”, | “C4”; |
| “ciliaryganglion”, | “C5”; |
| “cingulatecortex”, | “C6”; |
| “globuspallidus”, | “G1”; |
| “heart”, | “H1”; |
| “hypothalamus”, | “H2”; |
| “kidney”, | “K1”; |
| “liver”, | “L1”; |
| “lung”, | “L2”; |
| “lymphnode”, | “L3”; |
| “medullaoblongata”, | “M1”; |
| “occipitallobe”, | “O1”; |
| “olfactorybulb”, | “O2”; |
| “ovary”, | “O3”; |
| “pancreas”, | “P1”; |
| “pancreaticislets”, | “P2”; |
| “parietallobe”, | “P3”; |
| “pb_bdca4_dentritic_cells”, | “P4”; |
| “pb_cd14_monocytes”, | “P5”; |
| “pb_cd19_bcells”, | “P6”; |
| “pb_cd4_tcells”, | “P7”; |
| “pb_cd56_nkcells”, | “P8”; |
| “pb_cd8_tcells”, | “P9”; |
| “pituitary”, | “Pa”; |
| “placenta”, | “Pb”; |
| “pons”, | “Pc”; |
| “prefrontalcortex”, | “Pd”; |
| “prostate”, | “Pe”; |
| “salivarygland”, | “S1”; |
| “skeletalmuscle”, | “S2”; |
| “skin”, | “S3”; |
| “smoothmuscle”, | “S4”; |
| “spinalcord”, | “S5”; |
| “subthalamicnucleus”, | “S6”; |
| “superiorcervicalganglion”, | “S7”; |
| “temporallobe”, | “T1”; |
| “testis”, | “T2”; |
| “testisgermcell”, | “T3”; |
| “testisinterstitial”, | “T4”; |
| “testisleydigcell”, | “T5”; |
| “testisseminiferoustubule”, | “S6”; |
| “thalamus”, | “T7”; |
| “thymus”, | “T8”; |
| “thyroid”, | “T9”; |
| “tonsil”, | “Ta”; |
| “trachea”, | “Tb”; |
| “trigeminalganglion”, | “Tc”; |
| “uterus”, | “U1”; |
| “uteruscorpus”, | “U2”; |
| “wholeblood”, | “W1”; |
| “wholebrain”, | “W2”; |

[0365] It should be noted that the terms “segment”, “seg” and “node” are used interchangeably in reference to nucleic acid sequences of the present invention, they refer to portions of nucleic acid sequences that were shown to have one or more properties as described below. They are also the building blocks that were used to construct complete nucleic acid sequences as described in greater detail below. Optionally and preferably, they are examples of oligonucleotides which are embodiments of the present invention, for example as amplicons, hybridization units and/or from which primers and/or complementary oligonucleotides may optionally be derived, and/or for any other use.

[0366] As used herein the phrase “disease” includes any type of pathology and/or damage, including both chronic and acute damage, as well as a progress from acute to chronic damage.

[0367] The term “marker” in the context of the present invention refers to a nucleic acid fragment, a peptide, or a polypeptide, which is differentially present in a sample taken from patients (subjects) having one of the herein-described diseases or conditions, as compared to a comparable sample taken from subjects who do not have one the above-described diseases or conditions.

[0368] The phrase “differentially present” refers to differences in the quantity of a marker present in a sample taken from patients having one of the herein-described diseases or conditions as compared to a comparable sample taken from patients who do not have one of the herein-described diseases or conditions. For example, a nucleic acid fragment may optionally be differentially present between the two samples if the amount of the nucleic acid fragment in one sample is significantly different from the amount of the nucleic acid fragment in the other sample, for example as measured by hybridization and/or NAT-based assays. A polypeptide is differentially present between the two samples if the amount of the polypeptide in one sample is significantly different from the amount of the polypeptide in the other sample. It should be noted that if the marker is detectable in one sample and not detectable in the other, then such a marker can be considered to be differentially present. Optionally, a relatively low amount of up-regulation may serve as the marker, as described herein. One of ordinary skill in the art could easily determine such relative levels of the markers; further guidance is provided in the description of each individual marker below.

[0369] As used herein the phrase “diagnostic” means identifying the presence or nature of a pathologic condition. Diagnostic methods differ in their sensitivity and specificity. The “sensitivity” of a diagnostic assay is the percentage of diseased individuals who test positive (percent of “true positives”). Diseased individuals not detected by the assay are “false negatives.” Subjects who are not diseased and who test negative in the assay are termed “true negatives.” The “specificity” of a diagnostic assay is 1 minus the false positive rate, where the “false positive” rate is defined as the proportion of those without the disease who test positive. While a particular diagnostic method may not provide a definitive diagnosis of a condition, it suffices if the method provides a positive indication that aids in diagnosis.

[0370] As used herein the phrase “diagnosing” refers to classifying a disease or a symptom, determining a severity of the disease, monitoring disease progression, forecasting an outcome of a disease and/or prospects of recovery. The term “detecting” may also optionally encompass any of the above.

[0371] Diagnosis of a disease according to the present invention can be effected by determining a level of a polynucleotide or a polypeptide of the present invention in a biological sample obtained from the subject, wherein the level determined can be correlated with predisposition to, or presence or absence of the disease. It should be noted that a “biological sample obtained from the subject” may also optionally comprise a sample that has not been physically removed from the subject, as described in greater detail below.

[0372] As used herein, the term “level” refers to expression levels of RNA and/or protein or to DNA copy number of a marker of the present invention.

[0373] Typically the level of the marker in a biological sample obtained from the subject is different (i.e., increased or decreased) from the level of the same variant in a similar sample obtained from a healthy individual (examples of biological samples are described herein).

[0374] Numerous well known tissue or fluid collection methods can be utilized to collect the biological sample from the subject in order to determine the level of DNA, RNA and/or polypeptide of the variant of interest in the subject.

[0375] Examples include, but are not limited to, fine needle biopsy, needle biopsy, core needle biopsy and surgical biopsy (e.g., brain biopsy), and lavage. Regardless of the procedure employed, once a biopsy/sample is obtained the level of the variant can be determined and a diagnosis can thus be made.

[0376] Determining the level of the same variant in normal tissues of the same origin is preferably effected along-side to detect an elevated expression and/or amplification and/or a decreased expression, of the variant as opposed to the normal tissues.

[0377] A “test amount” of a marker refers to an amount of a marker in a subject's sample that is consistent with a diagnosis of a particular disease or condition. A test amount can be either in absolute amount (e.g., microgram/ml) or a relative amount (e.g., relative intensity of signals).

[0378] A “control amount” of a marker can be any amount or a range of amounts to be compared against a test amount of a marker. For example, a control amount of a marker can be the amount of a marker in a patient with a particular disease or condition or a person without such a disease or condition. A control amount can be either in absolute amount (e.g., microgram/ml) or a relative amount (e.g., relative intensity of signals).

[0379] “Detect” refers to identifying the presence, absence or amount of the object to be detected.

[0380] A “label” includes any moiety or item detectable by spectroscopic, photo chemical, biochemical, immunochemical, or chemical means. For example, useful labels include ³²P, ³⁵S, fluorescent dyes, electron-dense reagents, enzymes (e.g., as commonly used in an ELISA), biotin-streptavadin, dioxigenin, haptens and proteins for which antisera or monoclonal antibodies are available, or nucleic acid molecules with a sequence complementary to a target. The label often generates a measurable signal, such as a radioactive, chromogenic, or fluorescent signal, that can be used to quantify the amount of bound label in a sample. The label can be incorporated in or attached to a primer or probe either covalently, or through ionic, van der Waals or hydrogen bonds, e.g., incorporation of radioactive nucleotides, or biotinylated nucleotides that are recognized by streptavadin. The label may be directly or indirectly detectable. Indirect detection can involve the binding of a second label to the first label, directly or indirectly. For example, the label can be the ligand of a binding partner, such as biotin, which is a binding partner for streptavadin, or a nucleotide sequence, which is the binding partner for a complementary sequence, to which it can specifically hybridize. The binding partner may itself be directly detectable, for example, an antibody may be itself labeled with a fluorescent molecule. The binding partner also may be indirectly detectable, for example, a nucleic acid having a complementary nucleotide sequence can be a part of a branched DNA molecule that is in turn detectable through hybridization with other labeled nucleic acid molecules (see, e.g., P. D. Fahrlander and A. Klausner, Bio/Technology 6:1165 (1988)). Quantitation of the signal is achieved by, e.g., scintillation counting, densitometry, or flow cytometry.

[0381] Exemplary detectable labels, optionally and preferably for use with immunoassays, include but are not limited to magnetic beads, fluorescent dyes, radiolabels, enzymes (e.g., horse radish peroxide, alkaline phosphatase and others commonly used in an ELISA), and calorimetric labels such as colloidal gold or colored glass or plastic beads. Alternatively, the marker in the sample can be detected using an indirect assay, wherein, for example, a second, labeled antibody is used to detect bound marker-specific antibody, and/or in a competition or inhibition assay wherein, for example, a monoclonal antibody which binds to a distinct epitope of the marker are incubated simultaneously with the mixture.

[0382] “Immunoassay” is an assay that uses an antibody to specifically bind an antigen. The immunoassay is characterized by the use of specific binding properties of a particular antibody to isolate, target, and/or quantify the antigen.

[0383] The phrase “specifically (or selectively) binds” to an antibody or “specifically (or selectively) immunoreactive with,” when referring to a protein or peptide (or other epitope), refers to a binding reaction that is determinative of the presence of the protein in a heterogeneous population of proteins and other biologics. Thus, under designated immunoassay conditions, the specified antibodies bind to a particular protein at least two times greater than the background (non-specific signal) and do not substantially bind in a significant amount to other proteins present in the sample. Specific binding to an antibody under such conditions may require an antibody that is selected for its specificity for a particular protein. For example, polyclonal antibodies raised to seminal basic protein from specific species such as rat, mouse, or human can be selected to obtain only those polyclonal antibodies that are specifically immunoreactive with seminal basic protein and not with other proteins, except for polymorphic variants and alleles of seminal basic protein. This selection may be achieved by subtracting out antibodies that cross-react with seminal basic protein molecules from other species. A variety of immunoassay formats may be used to select antibodies specifically immunoreactive with a particular protein. For example, solid-phase ELISA immunoassays are routinely used to select antibodies specifically immunoreactive with a protein (see, e.g., Harlow & Lane, Antibodies, A Laboratory Manual (1988), for a description of immunoassay formats and conditions that can be used to determine specific immunoreactivity). Typically a specific or selective reaction will be at least twice background signal or noise and more typically more than 10 to 100 times background.

[0384] In another embodiment, the present invention relates to bridges, tails, heads and/or insertions, and/or analogs, homologs and derivatives of such peptides. Such bridges, tails, heads and/or insertions are described in greater detail below with regard to the Examples.

[0385] As used herein a “tail” refers to a peptide sequence at the end of an amino acid sequence that is unique to a splice variant according to the present invention. Therefore, a splice variant having such a tail may optionally be considered as a chimera, in that at least a first portion of the splice variant is typically highly homologous (often 100% identical) to a portion of the corresponding known protein, while at least a second portion of the variant comprises the tail.

[0386] As used herein a “head” refers to a peptide sequence at the beginning of an amino acid sequence that is unique to a splice variant according to the present invention. Therefore, a splice variant having such a head may optionally be considered as a chimera, in that at least a first portion of the splice variant comprises the head, while at least a second portion is typically highly homologous (often 100% identical) to a portion of the corresponding known protein.

[0387] As used herein “an edge portion” refers to a connection between two portions of a splice variant according to the present invention that were not joined in the wild type or known protein. An edge may optionally arise due to a join between the above “known protein” portion of a variant and the tail, for example, and/or may occur if an internal portion of the wild type sequence is no longer present, such that two portions of the sequence are now contiguous in the splice variant that were not contiguous in the known protein. A “bridge” may optionally be an edge portion as described above, but may also include a join between a head and a “known protein” portion of a variant, or a join between a tail and a “known protein” portion of a variant, or a join between an insertion and a “known protein” portion of a variant.

[0388] Optionally and preferably, a bridge between a tail or a head or a unique insertion, and a “known protein” portion of a variant, comprises at least about 10 amino acids, more preferably at least about 20 amino acids, most preferably at least about 30 amino acids, and even more preferably at least about 40 amino acids, in which at least one amino acid is from the tail/head/insertion and at least one amino acid is from the “known protein” portion of a variant. Also optionally, the bridge may comprise any number of amino acids from about 10 to about 40 amino acids (for example, 10, 11, 12, 13 . . . 37, 38, 39, 40 amino acids in length, or any number in between).

[0389] It should be noted that a bridge cannot be extended beyond the length of the sequence in either direction, and it should be assumed that every bridge description is to be read in such manner that the bridge length does not extend beyond the sequence itself.

[0390] Furthermore, bridges are described with regard to a sliding window in certain contexts below. For example, certain descriptions of the bridges feature the following format: a bridge between two edges (in which a portion of the known protein is not present in the variant) may optionally be described as follows: a bridge portion of CONTIG-NAME_P1 (representing the name of the protein), comprising a polypeptide having a length “n”, wherein n is at least about 10 amino acids in length, optionally at least about 20 amino acids in length, preferably at least about 30 amino acids in length, more preferably at least about 40 amino acids in length and most preferably at least about 50 amino acids in length, wherein at least two amino acids comprise XX (2 amino acids in the center of the bridge, one from each end of the edge), having a structure as follows (numbering according to the sequence of CONTIG-NAME_P1): a sequence starting from any of amino acid numbers 49−x to 49 (for example); and ending at any of amino acid numbers 50+((n−2)−x) (for example), in which x varies from 0 to n−2. In this example, it should also be read as including bridges in which n is any number of amino acids between 10-50 amino acids in length. Furthermore, the bridge polypeptide cannot extend beyond the sequence, so it should be read such that 49−x (for example) is not less than 1, nor 50+((n−2)−x) (for example) greater than the total sequence length.

[0391] In another embodiment, this invention provides antibodies specifically recognizing the splice variants and polypeptide fragments thereof of this invention. Preferably such antibodies differentially recognize splice variants of the present invention but do not recognize a corresponding known protein (such known proteins are discussed with regard to their splice variants in the Examples below).

[0392] In another embodiment, this invention provides an isolated nucleic acid molecule encoding for a splice variant according to the present invention, having a nucleotide sequence as set forth in any one of the sequences listed herein, or a sequence complementary thereto. In another embodiment, this invention provides an isolated nucleic acid molecule, having a nucleotide sequence as set forth in any one of the sequences listed herein, or a sequence complementary thereto. In another embodiment, this invention provides an oligonucleotide of at least about 12 nucleotides, specifically hybridizable with the nucleic acid molecules of this invention. In another embodiment, this invention provides vectors, cells, liposomes and compositions comprising the isolated nucleic acids of this invention.

[0393] In another embodiment, this invention provides a method for detecting a splice variant according to the present invention in a biological sample, comprising: contacting a biological sample with an antibody specifically recognizing a splice variant according to the present invention under conditions whereby the antibody specifically interacts with the splice variant in the biological sample but do not recognize known corresponding proteins (wherein the known protein is discussed with regard to its splice variant(s) in the Examples below), and detecting said interaction; wherein the presence of an interaction correlates with the presence of a splice variant in the biological sample.

[0394] In another embodiment, this invention provides a method for detecting a splice variant nucleic acid sequences in a biological sample, comprising: hybridizing the isolated nucleic acid molecules or oligonucleotide fragments of at least about a minimum length to a nucleic acid material of a biological sample and detecting a hybridization complex; wherein the presence of a hybridization complex correlates with the presence of a splice variant nucleic acid sequence in the biological sample.

[0395] According to the present invention, the splice variants described herein are non-limiting examples of markers for diagnosing marker-detectable disease and/or an indicative condition. Each splice variant marker of the present invention can be used alone or in combination, for various uses, including but not limited to, prognosis, prediction, screening, early diagnosis, determination of progression, therapy selection and treatment monitoring of marker-detectable disease and/or an indicative condition, including a transition from an indicative condition to marker-detectable disease.

[0396] According to optional but preferred embodiments of the present invention, any marker according to the present invention may optionally be used alone or combination. Such a combination may optionally comprise a plurality of markers described herein, optionally including any subcombination of markers, and/or a combination featuring at least one other marker, for example a known marker. Furthermore, such a combination may optionally and preferably be used as described above with regard to determining a ratio between a quantitative or semi-quantitative measurement of any marker described herein to any other marker described herein, and/or any other known marker, and/or any other marker. With regard to such a ratio between any marker described herein (or a combination thereof) and a known marker, more preferably the known marker comprises the “known protein” as described in greater detail below with regard to each cluster or gene.

[0397] Panels of Markers According to the Present Invention Optionally with One or More Known Marker(s)

[0398] The present invention is of methods, uses, devices and assays for diagnosis of a disease or condition. Optionally a plurality of biomarkers (or markers) may be used with the present invention. The plurality of markers may optionally include a plurality of markers described herein, and/or one or more known markers. The plurality of markers is preferably then correlated with the disease or condition. For example, such correlating may optionally comprise determining the concentration of each of the plurality of markers, and individually comparing each marker concentration to a threshold level. Optionally, if the marker concentration is above or below the threshold level (depending upon the marker and/or the diagnostic test being performed), the marker concentration correlates with the disease or condition. Optionally and preferably, a plurality of marker concentrations correlate with the disease or condition.

[0399] Alternatively, such correlating may optionally comprise determining the concentration of each of the plurality of markers, calculating a single index value based on the concentration of each of the plurality of markers, and comparing the index value to a threshold level.

[0400] Also alternatively, such correlating may optionally comprise determining a temporal change in at least one of the markers, and wherein the temporal change is used in the correlating step.

[0401] Also alternatively, such correlating may optionally comprise determining whether at least “X” number of the plurality of markers has a concentration outside of a predetermined range and/or above or below a threshold (as described above). The value of “X” may optionally be one marker, a plurality of markers or all of the markers; alternatively or additionally, rather than including any marker in the count for “X”, one or more specific markers of the plurality of markers may optionally be required to correlate with the disease or condition (according to a range and/or threshold).

[0402] Also alternatively, such correlating may optionally comprise determining whether a ratio of marker concentrations for two markers is outside a range and/or above or below a threshold. Optionally, if the ratio is above or below the threshold level and/or outside a range, the ratio correlates with the disease or condition.

[0403] Optionally, a combination of two or more these correlations may be used with a single panel and/or for correlating between a plurality of panels.

[0404] Optionally, the method distinguishes a disease or condition with a sensitivity of at least 70% at a specificity of at least 85% when compared to normal subjects. As used herein, sensitivity relates to the number of positive (diseased) samples detected out of the total number of positive samples present; specificity relates to the number of true negative (non-diseased) samples detected out of the total number of negative samples present. Preferably, the method distinguishes a disease or condition with a sensitivity of at least 80% at a specificity of at least 90% when compared to normal subjects. More preferably, the method distinguishes a disease or condition with a sensitivity of at least 90% at a specificity of at least 90% when compared to normal subjects. Also more preferably, the method distinguishes a disease or condition with a sensitivity of at least 70% at a specificity of at least 85% when compared to subjects exhibiting symptoms that mimic disease or condition symptoms.

[0405] A marker panel may be analyzed in a number of fashions well known to those of skill in the art. For example, each member of a panel may be compared to a “normal” value, or a value indicating a particular outcome. A particular diagnosis/prognosis may depend upon the comparison of each marker to this value; alternatively, if only a subset of markers are outside of a normal range, this subset may be indicative of a particular diagnosis/prognosis. The skilled artisan will also understand that diagnostic markers, differential diagnostic markers, prognostic markers, time of onset markers, disease or condition differentiating markers, etc., may be combined in a single assay or device. For example, with stroke as a non-limiting example of a disease or condition, certain markers in a panel may be commonly used to diagnose the existence of a stroke, while other members of the panel may indicate if an acute stroke has occurred, while still other members of the panel may indicate if a non-acute stroke has occurred. Markers may also be commonly used for multiple purposes by, for example, applying a different threshold or a different weighting factor to the marker for the different purpose(s). For example, again with stroke as a non-limiting example of a disease or condition, a marker at one concentration or weighting may be used, alone or as part of a larger panel, to indicate if an acute stroke has occurred, and the same marker at a different concentration or weighting may be used, alone or as part of a larger panel, to indicate if a non-acute stroke has occurred.

[0406] Preferred panels comprise markers for the following purposes: diagnosis of a disease; diagnosis of disease and indication if the disease is in an acute phase and/or if an acute attack of the disease has occurred (for example for CVS, heart disease, stroke and/or cerebrovascular accident); diagnosis of disease and indication if the disease is in a non-acute phase and/or if a non-acute attack of the disease has occurred (for example for CVS, heart disease, stroke and/or cerebrovascular accident); indication whether a combination of acute and non-acute phases or attacks has occurred; diagnosis of a disease and prognosis of a subsequent adverse outcome; diagnosis of a disease and prognosis of a subsequent acute or non-acute phase or attack; disease progression (for example for cancer, such progression may include for example occurrence or recurrence of metastasis).

[0407] The above diagnoses may also optionally include differential diagnosis of the disease to distinguish it from other diseases, including those diseases that may feature one or more similar or identical symptoms.

[0408] In certain embodiments, one or more diagnostic or prognostic indicators are correlated to a condition or disease by merely the presence or absence of the indicator(s). In other embodiments, threshold level(s) of a diagnostic or prognostic indicator(s) can be established, and the level of the indicator(s) in a patient sample can simply be compared to the threshold level(s). The sensitivity and specificity of a diagnostic and/or prognostic test depends on more than just the analytical “quality” of the test—they also depend on the definition of what constitutes an abnormal result. In practice, Receiver Operating Characteristic curves, or “ROC” curves, are typically calculated by plotting the value of a variable versus its relative frequency in “normal” and “disease” populations, and/or by comparison of results from a subject before, during and/or after treatment. For any particular marker, a distribution of marker levels for subjects with and without a disease will likely overlap. Under such conditions, a test does not absolutely distinguish normal from disease with 100% accuracy, and the area of overlap indicates where the test cannot distinguish normal from disease. A threshold is selected, above which (or below which, depending on how a marker changes with the disease) the test is considered to be abnormal and below which the test is considered to be normal. The area under the ROC curve is a measure of the probability that the perceived measurement will allow correct identification of a condition.

[0409] The horizontal axis of the ROC curve represents (1-specificity), which increases with the rate of false positives. The vertical axis of the curve represents sensitivity, which increases with the rate of true positives. Thus, for a particular cutoff selected, the value of (1-specificity) may be determined, and a corresponding sensitivity may be obtained. The area under the ROC curve is a measure of the probability that the measured marker level will allow correct identification of a disease or condition. Thus, the area under the ROC curve can be used to determine the effectiveness of the test.

[0410] ROC curves can be used even when test results don't necessarily give an accurate number. As long as one can rank results, one can create an ROC curve. For example, results of a test on “disease” samples might be ranked according to degree (say 1=low, 2=normal, and 3=high). This ranking can be correlated to results in the “normal” population, and a ROC curve created. These methods are well known in the art (see for example Hanley et al., Radiology 143: 29-36 (1982), incorporated by reference as if fully set forth herein).

[0411] One or more markers may lack diagnostic or prognostic value when considered alone, but when used as part of a panel, such markers may be of great value in determining a particular diagnosis/prognosis. In preferred embodiments, particular thresholds for one or more markers in a panel are not relied upon to determine if a profile of marker levels obtained from a subject are indicative of a particular diagnosis/prognosis. Rather, the present invention may utilize an evaluation of the entire marker profile by plotting ROC curves for the sensitivity of a particular panel of markers versus 1-(specificity) for the panel at various cutoffs. In these methods, a profile of marker measurements from a subject is considered together to provide a global probability (expressed either as a numeric score or as a percentage risk) that an individual has had a disease, is at risk for developing such a disease, optionally the type of disease which the individual has had or is at risk for, and so forth etc. In such embodiments, an increase in a certain subset of markers may be sufficient to indicate a particular diagnosis/prognosis in one patient, while an increase in a different subset of markers may be sufficient to indicate the same or a different diagnosis/prognosis in another patient. Weighting factors may also be applied to one or more markers in a panel, for example, when a marker is of particularly high utility in identifying a particular diagnosis/prognosis, it may be weighted so that at a given level it alone is sufficient to signal a positive result. Likewise, a weighting factor may provide that no given level of a particular marker is sufficient to signal a positive result, but only signals a result when another marker also contributes to the analysis.

[0412] In preferred embodiments, markers and/or marker panels are selected to exhibit at least 70% sensitivity, more preferably at least 80% sensitivity, even more preferably at least 85% sensitivity, still more preferably at least 90% sensitivity, and most preferably at least 95% sensitivity, combined with at least 70% specificity, more preferably at least 80% specificity, even more preferably at least 85% specificity, still more preferably at least 90% specificity, and most preferably at least 95% specificity. In particularly preferred embodiments, both the sensitivity and specificity are at least 75%, more preferably at least 80%, even more preferably at least 85%, still more preferably at least 90%, and most preferably at least 95%. Sensitivity and/or specificity may optionally be determined as described above, with regard to the construction of ROC graphs and so forth, for example.

[0413] According to preferred embodiments of the present invention, individual markers and/or combinations (panels) of markers may optionally be used for diagnosis of time of onset of a disease or condition. Such diagnosis may optionally be useful for a wide variety of conditions, preferably including those conditions with an abrupt onset.

[0414] The phrase “determining the prognosis” as used herein refers to methods by which the skilled artisan can predict the course or outcome of a condition in a patient. The term “prognosis” does not refer to the ability to predict the course or outcome of a condition with 100% accuracy, or even that a given course or outcome is more likely to occur than not. Instead, the skilled artisan will understand that the term “prognosis” refers to an increased probability that a certain course or outcome will occur; that is, that a course or outcome is more likely to occur in a patient exhibiting a given condition, when compared to those individuals not exhibiting the condition. For example, in individuals not exhibiting the condition, the chance of a given outcome may be about 3%. In preferred embodiments, a prognosis is about a 5% chance of a given outcome, about a 7% chance, about a 10% chance, about a 12% chance, about a 15% chance, about a 20% chance, about a 25% chance, about a 30% chance, about a 40% chance, about a 50% chance, about a 60% chance, about a 75% chance, about a 90% chance, and about a 95% chance. The term “about” in this context refers to +/−1%.

[0415] The skilled artisan will understand that associating a prognostic indicator with a predisposition to an adverse outcome is a statistical analysis. For example, a marker level of greater than 80 pg/mL may signal that a patient is more likely to suffer from an adverse outcome than patients with a level less than or equal to 80 pg/mL, as determined by a level of statistical significance. Additionally, a change in marker concentration from baseline levels may be reflective of patient prognosis, and the degree of change in marker level may be related to the severity of adverse events. Statistical significance is often determined by comparing two or more populations, and determining a confidence interval and/or a p value. See, e.g., Dowdy and Wearden, Statistics for Research, John Wiley & Sons, New York, 1983. Preferred confidence intervals of the invention are 90%, 95%, 97.5%, 98%, 99%, 99.5%, 99.9% and 99.99%, while preferred p values are 0.1, 0.05, 0.025, 0.02, 0.01, 0.005, 0.001, and 0.0001. Exemplary statistical tests for associating a prognostic indicator with a predisposition to an adverse outcome are described hereinafter.

[0416] In other embodiments, a threshold degree of change in the level of a prognostic or diagnostic indicator can be established, and the degree of change in the level of the indicator in a patient sample can simply be compared to the threshold degree of change in the level. A preferred threshold change in the level for markers of the invention is about 5%, about 10%, about 15%, about 20%, about 25%, about 30%, about 50%, about 75%, about 100%, and about 150%. The term “about” in this context refers to +/−10%. In yet other embodiments, a “nomogram” can be established, by which a level of a prognostic or diagnostic indicator can be directly related to an associated disposition towards a given outcome. The skilled artisan is acquainted with the use of such nomograms to relate two numeric values with the understanding that the uncertainty in this measurement is the same as the uncertainty in the marker concentration because individual sample measurements are referenced, not population averages.

[0417] Exemplary, non-limiting methods and systems for identification of suitable biomarkers for marker panels are now described. Methods and systems for the identification of a one or more markers for the diagnosis, and in particular for the differential diagnosis, of disease have been described previously. Suitable methods for identifying markers useful for the diagnosis of disease states are described in detail in U.S. patent application no. 2004-0126767, entitled METHOD AND SYSTEM FOR DISEASE DETECTION USING MARKER COMBINATIONS, filed Dec. 27, 2002, hereby incorporated by reference in its entirety as if fully set forth herein. One skilled in the art will also recognize that univariate analysis of markers can be performed and the data from the univariate analyses of multiple markers can be combined to form panels of markers to differentiate different disease conditions.

[0418] In developing a panel of markers useful in diagnosis, data for a number of potential markers may be obtained from a group of subjects by testing for the presence or level of certain markers. The group of subjects is divided into two sets, and preferably the first set and the second set each have an approximately equal number of subjects. The first set includes subjects who have been confirmed as having a disease or, more generally, being in a first condition state. For example, this first set of patients may be those that have recently had a disease and/or a particular type of the disease. The confirmation of this condition state may be made through more rigorous and/or expensive testing, preferably according to a previously defined diagnostic standard. Hereinafter, subjects in this first set will be referred to as “diseased”.

[0419] The second set of subjects are simply those who do not fall within the first set. Subjects in this second set may be “non-diseased;” that is, normal subjects. Alternatively, subjects in this second set may be selected to exhibit one symptom or a constellation of symptoms that mimic those symptoms exhibited by the “diseased” subjects.

[0420] The data obtained from subjects in these sets includes levels of a plurality of markers. Preferably, data for the same set of markers is available for each patient. This set of markers may include all candidate markers which may be suspected as being relevant to the detection of a particular disease or condition. Actual known relevance is not required. Embodiments of the methods and systems described herein may be used to determine which of the candidate markers are most relevant to the diagnosis of the disease or condition. The levels of each marker in the two sets of subjects may be distributed across a broad range, e.g., as a Gaussian distribution. However, no distribution fit is required.

[0421] As noted above, a marker often is incapable of definitively identifying a patient as either diseased or non-diseased. For example, if a patient is measured as having a marker level that falls within the overlapping region, the results of the test will be useless in diagnosing the patient. An artificial cutoff may be used to distinguish between a positive and a negative test result for the detection of the disease or condition. Regardless of where the cutoff is selected, the effectiveness of the single marker as a diagnosis tool is unaffected. Changing the cutoff merely trades off between the number of false positives and the number of false negatives resulting from the use of the single marker. The effectiveness of a test having such an overlap is often expressed using a ROC (Receiver Operating Characteristic) curve as described above.

[0422] As discussed above, the measurement of the level of a single marker may have limited usefulness. The measurement of additional markers provides additional information, but the difficulty lies in properly combining the levels of two potentially unrelated measurements. In the methods and systems according to embodiments of the present invention, data relating to levels of various markers for the sets of diseased and non-diseased patients may be used to develop a panel of markers to provide a useful panel response. The data may be provided in a database such as Microsoft Access, Oracle, other SQL databases or simply in a data file. The database or data file may contain, for example, a patient identifier such as a name or number, the levels of the various markers present, and whether the patient is diseased or non-diseased.

[0423] Next, an artificial cutoff region may be initially selected for each marker. The location of the cutoff region may initially be selected at any point, but the selection may affect the optimization process described below. In this regard, selection near a suspected optimal location may facilitate faster convergence of the optimizer. In a preferred method, the cutoff region is initially centered about the center of the overlap region of the two sets of patients. In one embodiment, the cutoff region may simply be a cutoff point. In other embodiments, the cutoff region may have a length of greater than zero. In this regard, the cutoff region may be defined by a center value and a magnitude of length. In practice, the initial selection of the limits of the cutoff region may be determined according to a pre-selected percentile of each set of subjects. For example, a point above which a pre-selected percentile of diseased patients are measured may be used as the right (upper) end of the cutoff range.

[0424] Each marker value for each patient may then be mapped to an indicator. The indicator is assigned one value below the cutoff region and another value above the cutoff region. For example, if a marker generally has a lower value for non-diseased patients and a higher value for diseased patients, a zero indicator will be assigned to a low value for a particular marker, indicating a potentially low likelihood of a positive diagnosis. In other embodiments, the indicator may be calculated based on a polynomial. The coefficients of the polynomial may be determined based on the distributions of the marker values among the diseased and non-diseased subjects.

[0425] The relative importance of the various markers may be indicated by a weighting factor. The weighting factor may initially be assigned as a coefficient for each marker. As with the cutoff region, the initial selection of the weighting factor may be selected at any acceptable value, but the selection may affect the optimization process. In this regard, selection near a suspected optimal location may facilitate faster convergence of the optimizer. In a preferred method, acceptable weighting coefficients may range between zero and one, and an initial weighting coefficient for each marker may be assigned as 0.5. In a preferred embodiment, the initial weighting coefficient for each marker may be associated with the effectiveness of that marker by itself. For example, a ROC curve may be generated for the single marker, and the area under the ROC curve may be used as the initial weighting coefficient for that marker.

[0426] Next, a panel response may be calculated for each subject in each of the two sets. The panel response is a function of the indicators to which each marker level is mapped and the weighting coefficients for each marker. One advantage of using an indicator value rather than the marker value is that an extraordinarily high or low marker levels do not change the probability of a diagnosis of diseased or non-diseased for that particular marker. Typically, a marker value above a certain level generally indicates a certain condition state. Marker values above that level indicate the condition state with the same certainty. Thus, an extraordinarily high marker value may not indicate an extraordinarily high probability of that condition state. The use of an indicator which is constant on one side of the cutoff region eliminates this concern.

[0427] The panel response may also be a general function of several parameters including the marker levels and other factors including, for example, race and gender of the patient. Other factors contributing to the panel response may include the slope of the value of a particular marker over time. For example, a patient may be measured when first arriving at the hospital for a particular marker. The same marker may be measured again an hour later, and the level of change may be reflected in the panel response. Further, additional markers may be derived from other markers and may contribute to the value of the panel response. For example, the ratio of values of two markers may be a factor in calculating the panel response.

[0428] Having obtained panel responses for each subject in each set of subjects, the distribution of the panel responses for each set may now be analyzed. An objective function may be defined to facilitate the selection of an effective panel. The objective function should generally be indicative of the effectiveness of the panel, as may be expressed by, for example, overlap of the panel responses of the diseased set of subjects and the panel responses of the non-diseased set of subjects. In this manner, the objective function may be optimized to maximize the effectiveness of the panel by, for example, minimizing the overlap.

[0429] In a preferred embodiment, the ROC curve representing the panel responses of the two sets of subjects may be used to define the objective function. For example, the objective function may reflect the area under the ROC curve. By maximizing the area under the curve, one may maximize the effectiveness of the panel of markers. In other embodiments, other features of the ROC curve may be used to define the objective function. For example, the point at which the slope of the ROC curve is equal to one may be a useful feature. In other embodiments, the point at which the product of sensitivity and specificity is a maximum, sometimes referred to as the “knee,” may be used. In an embodiment, the sensitivity at the knee may be maximized. In further embodiments, the sensitivity at a predetermined specificity level may be used to define the objective function. Other embodiments may use the specificity at a predetermined sensitivity level may be used. In still other embodiments, combinations of two or more of these ROC-curve features may be used.

[0430] It is possible that one of the markers in the panel is specific to the disease or condition being diagnosed. When such markers are present at above or below a certain threshold, the panel response may be set to return a “positive” test result. When the threshold is not satisfied, however, the levels of the marker may nevertheless be used as possible contributors to the objective function.

[0431] An optimization algorithm may be used to maximize or minimize the objective function. Optimization algorithms are well-known to those skilled in the art and include several commonly available minimizing or maximizing functions including the Simplex method and other constrained optimization techniques. It is understood by those skilled in the art that some minimization functions are better than others at searching for global minimums, rather than local minimums. In the optimization process, the location and size of the cutoff region for each marker may be allowed to vary to provide at least two degrees of freedom per marker. Such variable parameters are referred to herein as independent variables. In a preferred embodiment, the weighting coefficient for each marker is also allowed to vary across iterations of the optimization algorithm. In various embodiments, any permutation of these parameters may be used as independent variables.

[0432] In addition to the above-described parameters, the sense of each marker may also be used as an independent variable. For example, in many cases, it may not be known whether a higher level for a certain marker is generally indicative of a diseased state or a non-diseased state. In such a case, it may be useful to allow the optimization process to search on both sides. In practice, this may be implemented in several ways. For example, in one embodiment, the sense may be a truly separate independent variable which may be flipped between positive and negative by the optimization process. Alternatively, the sense may be implemented by allowing the weighting coefficient to be negative.

[0433] The optimization algorithm may be provided with certain constraints as well. For example, the resulting ROC curve may be constrained to provide an area-under-curve of greater than a particular value. ROC curves having an area under the curve of 0.5 indicate complete randomness, while an area under the curve of 1.0 reflects perfect separation of the two sets. Thus, a minimum acceptable value, such as 0.75, may be used as a constraint, particularly if the objective function does not incorporate the area under the curve. Other constraints may include limitations on the weighting coefficients of particular markers. Additional constraints may limit the sum of all the weighting coefficients to a particular value, such as 1.0.

[0434] The iterations of the optimization algorithm generally vary the independent parameters to satisfy the constraints while minimizing or maximizing the objective function. The number of iterations may be limited in the optimization process. Further, the optimization process may be terminated when the difference in the objective function between two consecutive iterations is below a predetermined threshold, thereby indicating that the optimization algorithm has reached a region of a local minimum or a maximum.

[0435] Thus, the optimization process may provide a panel of markers including weighting coefficients for each marker and cutoff regions for the mapping of marker values to indicators. In order to develop lower-cost panels which require the measurement of fewer marker levels, certain markers may be eliminated from the panel. In this regard, the effective contribution of each marker in the panel may be determined to identify the relative importance of the markers. In one embodiment, the weighting coefficients resulting from the optimization process may be used to determine the relative importance of each marker. The markers with the lowest coefficients may be eliminated.

[0436] Individual panel response values may also be used as markers in the methods described herein. For example, a panel may be constructed from a plurality of markers, and each marker of the panel may be described by a function and a weighting factor to be applied to that marker (as determined by the methods described above). Each individual marker level is determined for a sample to be tested, and that level is applied to the predetermined function and weighting factor for that particular marker to arrive at a sample value for that marker. The sample values for each marker are added together to arrive at the panel response for that particular sample to be tested. For a “diseased” and “non-diseased” group of patients, the resulting panel responses may be treated as if they were just levels of another disease marker.

[0437] Measures of test accuracy may be obtained as described in Fischer et al., Intensive Care Med. 29: 1043-51, 2003 (hereby incorporated by reference as if fully set forth herein), and used to determine the effectiveness of a given marker or panel of markers. These measures include sensitivity and specificity, predictive values, likelihood ratios, diagnostic odds ratios, and ROC curve areas. As discussed above, suitable tests may exhibit one or more of the following results on these various measures: at least 75% sensitivity, combined with at least 75% specificity; ROC curve area of at least 0.7, more preferably at least 0.8, even more preferably at least 0.9, and most preferably at least 0.95; and/or a positive likelihood ratio (calculated as sensitivity/(1-specificity)) of at least 5, more preferably at least 10, and most preferably at least 20, and a negative likelihood ratio (calculated as (1-sensitivity)/specificity) of less than or equal to 0.3, more preferably less than or equal to 0.2, and most preferably less than or equal to 0.1.

[0438] According to other preferred embodiments of the present invention, a splice variant protein or a fragment thereof, or a splice variant nucleic acid sequence or a fragment thereof, may be featured as a biomarker for detecting marker-detectable disease and/or an indicative condition, such that a biomarker may optionally comprise any of the above.

[0439] According to still other preferred embodiments, the present invention optionally and preferably encompasses any amino acid sequence or fragment thereof encoded by a nucleic acid sequence corresponding to a splice variant protein as described herein. Any oligopeptide or peptide relating to such an amino acid sequence or fragment thereof may optionally also (additionally or alternatively) be used as a biomarker, including but not limited to the unique amino acid sequences of these proteins that are depicted as tails, heads, insertions, edges or bridges. The present invention also optionally encompasses antibodies capable of recognizing, and/or being elicited by, such oligopeptides or peptides.

[0440] The present invention also optionally and preferably encompasses any nucleic acid sequence or fragment thereof, or amino acid sequence or fragment thereof, corresponding to a splice variant of the present invention as described above, optionally for any application.

[0441] Non-limiting examples of methods or assays are described below.

[0442] The present invention also relates to kits based upon such diagnostic methods or assays.

### Nucleic Acid Sequences and Oligonucleotides

[0443] Various embodiments of the present invention encompass nucleic acid sequences described hereinabove; fragments thereof, sequences hybridizable therewith, sequences homologous thereto, sequences encoding similar polypeptides with different codon usage, altered sequences characterized by mutations, such as deletion, insertion or substitution of one or more nucleotides, either naturally occurring or artificially induced, either randomly or in a targeted fashion.

[0444] The present invention encompasses nucleic acid sequences described herein; fragments thereof, sequences hybridizable therewith, sequences homologous thereto [e.g., at least 50%, at least 55%, at least 60%, at least 65%, at least 70%, at least 75%, at least 80%, at least 85%, at least 95% or more say 100% identical to the nucleic acid sequences set forth below], sequences encoding similar polypeptides with different codon usage, altered sequences characterized by mutations, such as deletion, insertion or substitution of one or more nucleotides, either naturally occurring or man induced, either randomly or in a targeted fashion. The present invention also encompasses homologous nucleic acid sequences (i.e., which form a part of a polynucleotide sequence of the present invention) which include sequence regions unique to the polynucleotides of the present invention.

[0445] In cases where the polynucleotide sequences of the present invention encode previously unidentified polypeptides, the present invention also encompasses novel polypeptides or portions thereof, which are encoded by the isolated polynucleotide and respective nucleic acid fragments thereof described hereinabove.

[0446] A “nucleic acid fragment” or an “oligonucleotide” or a “polynucleotide” are used herein interchangeably to refer to a polymer of nucleic acids. A polynucleotide sequence of the present invention refers to a single or double stranded nucleic acid sequences which is isolated and provided in the form of an RNA sequence, a complementary polynucleotide sequence (cDNA), a genomic polynucleotide sequence and/or a composite polynucleotide sequences (e.g., a combination of the above).

[0447] As used herein the phrase “complementary polynucleotide sequence” refers to a sequence, which results from reverse transcription of messenger RNA using a reverse transcriptase or any other RNA dependent DNA polymerase. Such a sequence can be subsequently amplified in vivo or in vitro using a DNA dependent DNA polymerase.

[0448] As used herein the phrase “genomic polynucleotide sequence” refers to a sequence derived (isolated) from a chromosome and thus it represents a contiguous portion of a chromosome.

[0449] As used herein the phrase “composite polynucleotide sequence” refers to a sequence, which is composed of genomic and cDNA sequences. A composite sequence can include some exonal sequences required to encode the polypeptide of the present invention, as well as some intronic sequences interposing therebetween. The intronic sequences can be of any source, including of other genes, and typically will include conserved splicing signal sequences. Such intronic sequences may further include cis acting expression regulatory elements.

[0450] Preferred embodiments of the present invention encompass oligonucleotide probes.

[0451] An example of an oligonucleotide probe which can be utilized by the present invention is a single stranded polynucleotide which includes a sequence complementary to the unique sequence region of any variant according to the present invention, including but not limited to a nucleotide sequence coding for an amino sequence of a bridge, tail, head and/or insertion according to the present invention, and/or the equivalent portions of any nucleotide sequence given herein (including but not limited to a nucleotide sequence of a node, segment or amplicon described herein).

[0452] Alternatively, an oligonucleotide probe of the present invention can be designed to hybridize with a nucleic acid sequence encompassed by any of the above nucleic acid sequences, particularly the portions specified above, including but not limited to a nucleotide sequence coding for an amino sequence of a bridge, tail, head and/or insertion according to the present invention, and/or the equivalent portions of any nucleotide sequence given herein (including but not limited to a nucleotide sequence of a node, segment or amplicon described herein).

[0453] Oligonucleotides designed according to the teachings of the present invention can be generated according to any oligonucleotide synthesis method known in the art such as enzymatic synthesis or solid phase synthesis. Equipment and reagents for executing solid-phase synthesis are commercially available from, for example, Applied Biosystems. Any other means for such synthesis may also be employed; the actual synthesis of the oligonucleotides is well within the capabilities of one skilled in the art and can be accomplished via established methodologies as detailed in, for example, “Molecular Cloning: A laboratory Manual” Sambrook et al., (1989); “Current Protocols in Molecular Biology” Volumes I-III Ausubel, R. M., ed. (1994); Ausubel et al., “Current Protocols in Molecular Biology”, John Wiley and Sons, Baltimore, Md. (1989); Perbal, “A Practical Guide to Molecular Cloning”, John Wiley & Sons, New York (1988) and “Oligonucleotide Synthesis” Gait, M. J., ed. (1984) utilizing solid phase chemistry, e.g. cyanoethyl phosphoramidite followed by deprotection, desalting and purification by for example, an automated trityl-on method or HPLC.

[0454] Oligonucleotides used according to this aspect of the present invention are those having a length selected from a range of about 10 to about 200 bases preferably about 15 to about 150 bases, more preferably about 20 to about 100 bases, most preferably about 20 to about 50 bases. Preferably, the oligonucleotide of the present invention features at least 17, at least 18, at least 19, at least 20, at least 22, at least 25, at least 30 or at least 40, bases specifically hybridizable with the biomarkers of the present invention.

[0455] The oligonucleotides of the present invention may comprise heterocylic nucleosides consisting of purines and the pyrimidines bases, bonded in a 3′ to 5′ phosphodiester linkage.

[0456] Preferably used oligonucleotides are those modified at one or more of the backbone, internucleoside linkages or bases, as is broadly described hereinunder.

[0457] Specific examples of preferred oligonucleotides useful according to this aspect of the present invention include oligonucleotides containing modified backbones or non-natural internucleoside linkages. Oligonucleotides having modified backbones include those that retain a phosphorus atom in the backbone, as disclosed in U.S. Pat. Nos. 4,469,863; 4,476,301; 5,023,243; 5,177,196; 5,188,897; 5,264,423; 5,276,019; 5,278,302; 5,286,717; 5,321,131; 5,399,676; 5,405,939; 5,453,496; 5,455,233; 5,466,677; 5,476,925; 5,519,126; 5,536,821; 5,541,306; 5,550,111; 5,563,253; 5,571,799; 5,587,361; and 5,625,050.

[0458] Preferred modified oligonucleotide backbones include, for example, phosphorothioates, chiral phosphorothioates, phosphorodithioates, phosphotriesters, aminoalkyl phosphotriesters, methyl and other alkyl phosphonates including 3′-alkylene phosphonates and chiral phosphonates, phosphinates, phosphoramidates including 3′-amino phosphoramidate and aminoalkylphosphoramidates, thionophosphoramidates, thionoalkylphosphonates, thionoalkylphosphotriesters, and boranophosphates having normal 3′-5′ linkages, 2′-5′ linked analogs of these, and those having inverted polarity wherein the adjacent pairs of nucleoside units are linked 3′-5′ to 5′-3′ or 2′-5′ to 5′-2′. Various salts, mixed salts and free acid forms can also be used.

[0459] Alternatively, modified oligonucleotide backbones that do not include a phosphorus atom therein have backbones that are formed by short chain alkyl or cycloalkyl internucleoside linkages, mixed heteroatom and alkyl or cycloalkyl internucleoside linkages, or one or more short chain heteroatomic or heterocyclic internucleoside linkages. These include those having morpholino linkages (formed in part from the sugar portion of a nucleoside); siloxane backbones; sulfide, sulfoxide and sulfone backbones; formacetyl and thioformacetyl backbones; methylene formacetyl and thioformacetyl backbones; alkene containing backbones; sulfamate backbones; methyleneimino and methylenehydrazino backbones; sulfonate and sulfonamide backbones; amide backbones; and others having mixed N, O, S and CH₂ component parts, as disclosed in U.S. Pat. Nos. 5,034,506; 5,166,315; 5,185,444; 5,214,134; 5,216,141; 5,235,033; 5,264,562; 5,264,564; 5,405,938; 5,434,257; 5,466,677; 5,470,967; 5,489,677; 5,541,307; 5,561,225; 5,596,086; 5,602,240; 5,610,289; 5,602,240; 5,608,046; 5,610,289; 5,618,704; 5,623,070; 5,663,312; 5,633,360; 5,677,437; and 5,677,439.

[0460] Other oligonucleotides which can be used according to the present invention, are those modified in both sugar and the internucleoside linkage, i.e., the backbone, of the nucleotide units are replaced with novel groups. The base units are maintained for complementation with the appropriate polynucleotide target. An example for such an oligonucleotide mimetic, includes peptide nucleic acid (PNA). United States patents that teach the preparation of PNA compounds include, but are not limited to, U.S. Pat. Nos. 5,539,082; 5,714,331; and 5,719,262, each of which is herein incorporated by reference. Other backbone modifications, which can be used in the present invention are disclosed in U.S. Pat. No. 6,303,374.

[0461] Oligonucleotides of the present invention may also include base modifications or substitutions. As used herein, “unmodified” or “natural” bases include the purine bases adenine (A) and guanine (G), and the pyrimidine bases thymine (T), cytosine (C) and uracil (U). Modified bases include but are not limited to other synthetic and natural bases such as 5-methylcytosine (5-me-C), 5-hydroxymethyl cytosine, xanthine, hypoxanthine, 2-aminoadenine, 6-methyl and other alkyl derivatives of adenine and guanine, 2-propyl and other alkyl derivatives of adenine and guanine, 2-thiouracil, 2-thiothymine and 2-thiocytosine, 5-halouracil and cytosine, 5-propynyl uracil and cytosine, 6-azo uracil, cytosine and thymine, 5-uracil (pseudouracil), 4-thiouracil, 8-halo, 8-amino, 8-thiol, 8-thioalkyl, 8-hydroxyl and other 8-substituted adenines and guanines, 5-halo particularly 5-bromo, 5-trifluoromethyl and other 5-substituted uracils and cytosines, 7-methylguanine and 7-methyladenine, 8-azaguanine and 8-azaadenine, 7-deazaguanine and 7-deazaadenine and 3-deazaguanine and 3-deazaadenine. Further bases particularly useful for increasing the binding affinity of the oligomeric compounds of the invention include 5-substituted pyrimidines, 6-azapyrimidines and N-2, N-6 and O-6 substituted purines, including 2-aminopropyladenine, 5-propynyluracil and 5-propynylcytosine. 5-methylcytosine substitutions have been shown to increase nucleic acid duplex stability by 0.6-1.2° C. and are presently preferred base substitutions, even more particularly when combined with 2′-O-methoxyethyl sugar modifications.

[0462] Another modification of the oligonucleotides of the invention involves chemically linking to the oligonucleotide one or more moieties or conjugates, which enhance the activity, cellular distribution or cellular uptake of the oligonucleotide. Such moieties include but are not limited to lipid moieties such as a cholesterol moiety, cholic acid, a thioether, e.g., hexyl-5-tritylthiol, a thiocholesterol, an aliphatic chain, e.g., dodecandiol or undecyl residues, a phospholipid, e.g., di-hexadecyl-rac-glycerol or triethylammonium 1,2-di-O-hexadecyl-rac-glycero-3-H-phosphonate, a polyamine or a polyethylene glycol chain, or adamantane acetic acid, a palmityl moiety, or an octadecylamine or hexylamino-carbonyl-oxycholesterol moiety, as disclosed in U.S. Pat. No. 6,303,374.

[0463] It is not necessary for all positions in a given oligonucleotide molecule to be uniformly modified, and in fact more than one of the aforementioned modifications may be incorporated in a single compound or even at a single nucleoside within an oligonucleotide.

[0464] It will be appreciated that oligonucleotides of the present invention may include further modifications for more efficient use as diagnostic agents and/or to increase bioavailability, therapeutic efficacy and reduce cytotoxicity.

[0465] To enable cellular expression of the polynucleotides of the present invention, a nucleic acid construct according to the present invention may be used, which includes at least a coding region of one of the above nucleic acid sequences, and further includes at least one cis acting regulatory element. As used herein, the phrase “cis acting regulatory element” refers to a polynucleotide sequence, preferably a promoter, which binds a trans acting regulator and regulates the transcription of a coding sequence located downstream thereto.

[0466] Any suitable promoter sequence can be used by the nucleic acid construct of the present invention.

[0467] Preferably, the promoter utilized by the nucleic acid construct of the present invention is active in the specific cell population transformed. Examples of cell type-specific and/or tissue-specific promoters include promoters such as albumin that is liver specific, lymphoid specific promoters [Calame et al., (1988) Adv. Immunol. 43:235-275]; in particular promoters of T-cell receptors [Winoto et al., (1989) EMBO J. 8:729-733] and immunoglobulins; [Banerji et al. (1983) Cell 33729-740], neuron-specific promoters such as the neurofilament promoter [Byrne et al. (1989) Proc. Natl. Acad. Sci. USA 86:5473-5477], pancreas-specific promoters [Edlunch et al. (1985) Science 230:912-916] or mammary gland-specific promoters such as the milk whey promoter (U.S. Pat. No. 4,873,316 and European Application Publication No. 264,166). The nucleic acid construct of the present invention can further include an enhancer, which can be adjacent or distant to the promoter sequence and can function in up regulating the transcription therefrom.

[0468] The nucleic acid construct of the present invention preferably further includes an appropriate selectable marker and/or an origin of replication. Preferably, the nucleic acid construct utilized is a shuttle vector, which can propagate both in E. coli (wherein the construct comprises an appropriate selectable marker and origin of replication) and be compatible for propagation in cells, or integration in a gene and a tissue of choice. The construct according to the present invention can be, for example, a plasmid, a bacmid, a phagemid, a cosmid, a phage, a virus or an artificial chromosome.

[0469] Examples of suitable constructs include, but are not limited to, pcDNA3, pcDNA3.1 (+/−), pGL3, PzeoSV2 (+/−), pDisplay, pEF/myc/cyto, pCMV/myc/cyto each of which is commercially available from Invitrogen Co. (www.invitrogen.com). Examples of retroviral vector and packaging systems are those sold by Clontech, San Diego, Calif., including Retro-X vectors pLNCX and pLXSN, which permit cloning into multiple cloning sites and the trasgene is transcribed from CMV promoter. Vectors derived from Mo-MuLV are also included such as pBabe, where the transgene will be transcribed from the 5′LTR promoter.

[0470] Currently preferred in vivo nucleic acid transfer techniques include transfection with viral or non-viral constructs, such as adenovirus, lentivirus, Herpes simplex I virus, or adeno-associated virus (AAV) and lipid-based systems. Useful lipids for lipid-mediated transfer of the gene are, for example, DOTMA, DOPE, and DC-Chol [Tonkinson et al., Cancer Investigation, 14(1): 54-65 (1996)]. The most preferred constructs for use in gene therapy are viruses, most preferably adenoviruses, AAV, lentiviruses, or retroviruses. A viral construct such as a retroviral construct includes at least one transcriptional promoter/enhancer or locus-defining element(s), or other elements that control gene expression by other means such as alternate splicing, nuclear RNA export, or post-translational modification of messenger. Such vector constructs also include a packaging signal, long terminal repeats (LTRs) or portions thereof, and positive and negative strand primer binding sites appropriate to the virus used, unless it is already present in the viral construct. In addition, such a construct typically includes a signal sequence for secretion of the peptide from a host cell in which it is placed. Preferably the signal sequence for this purpose is a mammalian signal sequence or the signal sequence of the polypeptide variants of the present invention. Optionally, the construct may also include a signal that directs polyadenylation, as well as one or more restriction sites and a translation termination sequence. By way of example, such constructs will typically include a 5′ LTR, a tRNA binding site, a packaging signal, an origin of second-strand DNA synthesis, and a 3′ LTR or a portion thereof. Other vectors can be used that are non-viral, such as cationic lipids, polylysine, and dendrimers.

### Hybridization Assays

[0471] Detection of a nucleic acid of interest in a biological sample may optionally be effected by hybridization-based assays using an oligonucleotide probe (non-limiting examples of probes according to the present invention were previously described).

[0472] Traditional hybridization assays include PCR, RT-PCR, Real-time PCR, RNase protection, in-situ hybridization, primer extension, Southern blots (DNA detection), dot or slot blots (DNA, RNA), and Northern blots (RNA detection) (NAT type assays are described in greater detail below). More recently, PNAs have been described (Nielsen et al. 1999, Current Opin. Biotechnol. 10:71-75). Other detection methods include kits containing probes on a dipstick setup and the like.

[0473] Hybridization based assays which allow the detection of a variant of interest (i.e., DNA or RNA) in a biological sample rely on the use of oligonucleotides which can be 10, 15, 20, or 30 to 100 nucleotides long preferably from 10 to 50, more preferably from 40 to 50 nucleotides long.

[0474] Thus, the isolated polynucleotides (oligonucleotides) of the present invention are preferably hybridizable with any of the herein described nucleic acid sequences under moderate to stringent hybridization conditions.

[0475] Moderate to stringent hybridization conditions are characterized by a hybridization solution such as containing 10% dextrane sulfate, 1 M NaCl, 1% SDS and 5×10⁶ cpm ³²P labeled probe, at 65° C., with a final wash solution of 0.2×SSC and 0.1% SDS and final wash at 65° C. and whereas moderate hybridization is effected using a hybridization solution containing 10% dextrane sulfate, 1 M NaCl, 1% SDS and 5×10⁶ cpm ³²P labeled probe, at 65° C., with a final wash solution of 1×SSC and 0.1% SDS and final wash at 50° C.

[0476] More generally, hybridization of short nucleic acids (below 200 bp in length, e.g. 17-40 bp in length) can be effected using the following exemplary hybridization protocols which can be modified according to the desired stringency; (i) hybridization solution of 6×SSC and 1% SDS or 3 M TMACI, 0.01 M sodium phosphate (pH 6.8), 1 mM EDTA (pH 7.6), 0.5% SDS, 100 μg/ml denatured salmon sperm DNA and 0.1% nonfat dried milk, hybridization temperature of 1-1.5° C. below the Tₘ, final wash solution of 3 M TMACI, 0.01 M sodium phosphate (pH 6.8), 1 mM EDTA (pH 7.6), 0.5% SDS at 1-1.5° C. below the Tₘ; (ii) hybridization solution of 6×SSC and 0.1% SDS or 3 M TMACI, 0.01 M sodium phosphate (pH 6.8), 1 mM EDTA (pH 7.6), 0.5% SDS, 100 μg/ml denatured salmon sperm DNA and 0.1% nonfat dried milk, hybridization temperature of 2-2.5° C. below the Tₘ, final wash solution of 3 M TMACI, 0.01 M sodium phosphate (pH 6.8), 1 mM EDTA (pH 7.6), 0.5% SDS at 1-1.5° C. below the Tₘ, final wash solution of 6×SSC, and final wash at 22° C.; (iii) hybridization solution of 6×SSC and 1% SDS or 3 M TMACI, 0.01 M sodium phosphate (pH 6.8), 1 mM EDTA (pH 7.6), 0.5% SDS, 100 μg/ml denatured salmon sperm DNA and 0.1% nonfat dried milk, hybridization temperature.

[0477] The detection of hybrid duplexes can be carried out by a number of methods. Typically, hybridization duplexes are separated from unhybridized nucleic acids and the labels bound to the duplexes are then detected. Such labels refer to radioactive, fluorescent, biological or enzymatic tags or labels of standard use in the art. A label can be conjugated to either the oligonucleotide probes or the nucleic acids derived from the biological sample.

[0478] Probes can be labeled according to numerous well known methods. Non-limiting examples of radioactive labels include 3H, 14C, ³²P, and ³⁵S, Non-limiting examples of detectable markers include ligands, fluorophores, chemiluminescent agents, enzymes, and antibodies. Other detectable markers for use with probes, which can enable an increase in sensitivity of the method of the invention, include biotin and radio-nucleotides. It will become evident to the person of ordinary skill that the choice of a particular label dictates the manner in which it is bound to the probe.

[0479] For example, oligonucleotides of the present invention can be labeled subsequent to synthesis, by incorporating biotinylated dNTPs or rNTP, or some similar means (e.g., photo-cross-linking a psoralen derivative of biotin to RNAs), followed by addition of labeled streptavidin (e.g., phycoerythrin-conjugated streptavidin) or the equivalent. Alternatively, when fluorescently-labeled oligonucleotide probes are used, fluorescein, lissamine, phycoerythrin, rhodamine (Perkin Elmer Cetus), Cy2, Cy3, Cy3.5, Cy5, Cy5.5, Cy7, Fluor X (Amersham) and others [e.g., Kricka et al. (1992), Academic Press San Diego, Calif] can be attached to the oligonucleotides.

[0480] Those skilled in the art will appreciate that wash steps may be employed to wash away excess target DNA or probe as well as unbound conjugate. Further, standard heterogeneous assay formats are suitable for detecting the hybrids using the labels present on the oligonucleotide primers and probes.

[0481] It will be appreciated that a variety of controls may be usefully employed to improve accuracy of hybridization assays. For instance, samples may be hybridized to an irrelevant probe and treated with RNAse A prior to hybridization, to assess false hybridization.

[0482] Although the present invention is not specifically dependent on the use of a label for the detection of a particular nucleic acid sequence, such a label might be beneficial, by increasing the sensitivity of the detection. Furthermore, it enables automation. Probes can be labeled according to numerous well known methods.

[0483] As commonly known, radioactive nucleotides can be incorporated into probes of the invention by several methods. Non-limiting examples of radioactive labels include ³H, ¹⁴C, ³²P, and ³⁵S.

[0484] Those skilled in the art will appreciate that wash steps may be employed to wash away excess target DNA or probe as well as unbound conjugate. Further, standard heterogeneous assay formats are suitable for detecting the hybrids using the labels present on the oligonucleotide primers and probes.

[0485] It will be appreciated that a variety of controls may be usefully employed to improve accuracy of hybridization assays.

[0486] Probes of the invention can be utilized with naturally occurring sugar-phosphate backbones as well as modified backbones including phosphorothioates, dithionates, alkyl phosphonates and a-nucleotides and the like. Probes of the invention can be constructed of either ribonucleic acid (RNA) or deoxyribonucleic acid (DNA), and preferably of DNA.

### NAT Assays

[0487] Detection of a nucleic acid of interest in a biological sample may also optionally be effected by NAT-based assays, which involve nucleic acid amplification technology, such as PCR for example (or variations thereof such as real-time PCR for example).

[0488] As used herein, a “primer” defines an oligonucleotide which is capable of annealing to (hybridizing with) a target sequence, thereby creating a double stranded region which can serve as an initiation point for DNA synthesis under suitable conditions.

[0489] Amplification of a selected, or target, nucleic acid sequence may be carried out by a number of suitable methods. See generally Kwoh et al., 1990, Am. Biotechnol. Lab. 8:14 Numerous amplification techniques have been described and can be readily adapted to suit particular needs of a person of ordinary skill. Non-limiting examples of amplification techniques include polymerase chain reaction (PCR), ligase chain reaction (LCR), strand displacement amplification (SDA), transcription-based amplification, the q3 replicase system and NASBA (Kwoh et al., 1989, Proc. NatI. Acad. Sci. USA 86, 1173-1177; Lizardi et al., 1988, BioTechnology 6:1197-1202; Malek et al., 1994, Methods Mol. Biol., 28:253-260; and Sambrook et al., 1989, supra).

[0490] The terminology “amplification pair” (or “primer pair”) refers herein to a pair of oligonucleotides (oligos) of the present invention, which are selected to be used together in amplifying a selected nucleic acid sequence by one of a number of types of amplification processes, preferably a polymerase chain reaction. Other types of amplification processes include ligase chain reaction, strand displacement amplification, or nucleic acid sequence-based amplification, as explained in greater detail below. As commonly known in the art, the oligos are designed to bind to a complementary sequence under selected conditions.

[0491] In one particular embodiment, amplification of a nucleic acid sample from a patient is amplified under conditions which favor the amplification of the most abundant differentially expressed nucleic acid. In one preferred embodiment, RT-PCR is carried out on an mRNA sample from a patient under conditions which favor the amplification of the most abundant mRNA. In another preferred embodiment, the amplification of the differentially expressed nucleic acids is carried out simultaneously. It will be realized by a person skilled in the art that such methods could be adapted for the detection of differentially expressed proteins instead of differentially expressed nucleic acid sequences.

[0492] The nucleic acid (i.e. DNA or RNA) for practicing the present invention may be obtained according to well known methods.

[0493] Oligonucleotide primers of the present invention may be of any suitable length, depending on the particular assay format and the particular needs and targeted genomes employed. Optionally, the oligonucleotide primers are at least 12 nucleotides in length, preferably between 15 and 24 molecules, and they may be adapted to be especially suited to a chosen nucleic acid amplification system. As commonly known in the art, the oligonucleotide primers can be designed by taking into consideration the melting point of hybridization thereof with its targeted sequence (Sambrook et al., 1989, Molecular Cloning—A Laboratory Manual, 2nd Edition, CSH Laboratories; Ausubel et al., 1989, in Current Protocols in Molecular Biology, John Wiley & Sons Inc., N.Y.).

[0494] It will be appreciated that antisense oligonucleotides may be employed to quantify expression of a splice isoform of interest. Such detection is effected at the pre-mRNA level. Essentially the ability to quantitate transcription from a splice site of interest can be effected based on splice site accessibility. Oligonucleotides may compete with splicing factors for the splice site sequences. Thus, low activity of the antisense oligonucleotide is indicative of splicing activity.

[0495] The polymerase chain reaction and other nucleic acid amplification reactions are well known in the art (various non-limiting examples of these reactions are described in greater detail below). The pair of oligonucleotides according to this aspect of the present invention are preferably selected to have compatible melting temperatures (Tm), e.g., melting temperatures which differ by less than that 7° C., preferably less than 5° C., more preferably less than 4° C., most preferably less than 3° C., ideally between 3° C. and 0° C.

[0496] Polymerase Chain Reaction (PCR): The polymerase chain reaction (PCR), as described in U.S. Pat. Nos. 4,683,195 and 4,683,202 to Mullis and Mullis et al., is a method of increasing the concentration of a segment of target sequence in a mixture of genomic DNA without cloning or purification. This technology provides one approach to the problems of low target sequence concentration. PCR can be used to directly increase the concentration of the target to an easily detectable level. This process for amplifying the target sequence involves the introduction of a molar excess of two oligonucleotide primers which are complementary to their respective strands of the double-stranded target sequence to the DNA mixture containing the desired target sequence. The mixture is denatured and then allowed to hybridize. Following hybridization, the primers are extended with polymerase so as to form complementary strands. The steps of denaturation, hybridization (annealing), and polymerase extension (elongation) can be repeated as often as needed, in order to obtain relatively high concentrations of a segment of the desired target sequence.

[0497] The length of the segment of the desired target sequence is determined by the relative positions of the primers with respect to each other, and, therefore, this length is a controllable parameter. Because the desired segments of the target sequence become the dominant sequences (in terms of concentration) in the mixture, they are said to be “PCR-amplified.”

[0498] Ligase Chain Reaction (LCR or LAR): The ligase chain reaction [LCR; sometimes referred to as “Ligase Amplification Reaction” (LAR)] has developed into a well-recognized alternative method of amplifying nucleic acids. In LCR, four oligonucleotides, two adjacent oligonucleotides which uniquely hybridize to one strand of target DNA, and a complementary set of adjacent oligonucleotides, which hybridize to the opposite strand are mixed and DNA ligase is added to the mixture. Provided that there is complete complementarity at the junction, ligase will covalently link each set of hybridized molecules. Importantly, in LCR, two probes are ligated together only when they base-pair with sequences in the target sample, without gaps or mismatches. Repeated cycles of denaturation, and ligation amplify a short segment of DNA. LCR has also been used in combination with PCR to achieve enhanced detection of single-base changes: see for example Segev, PCT Publication No. W09001069 A1 (1990). However, because the four oligonucleotides used in this assay can pair to form two short ligatable fragments, there is the potential for the generation of target-independent background signal. The use of LCR for mutant screening is limited to the examination of specific nucleic acid positions.

[0499] Self-Sustained Synthetic Reaction (3SR/NASBA): The self-sustained sequence replication reaction (3SR) is a transcription-based in vitro amplification system that can exponentially amplify RNA sequences at a uniform temperature. The amplified RNA can then be utilized for mutation detection. In this method, an oligonucleotide primer is used to add a phage RNA polymerase promoter to the 5′ end of the sequence of interest. In a cocktail of enzymes and substrates that includes a second primer, reverse transcriptase, RNase H, RNA polymerase and ribo- and deoxyribonucleoside triphosphates, the target sequence undergoes repeated rounds of transcription, cDNA synthesis and second-strand synthesis to amplify the area of interest. The use of 3SR to detect mutations is kinetically limited to screening small segments of DNA (e.g., 200-300 base pairs).

[0500] Q-Beta (Qβ) Replicase: In this method, a probe which recognizes the sequence of interest is attached to the replicatable RNA template for Qβ replicase. A previously identified major problem with false positives resulting from the replication of unhybridized probes has been addressed through use of a sequence-specific ligation step. However, available thermostable DNA ligases are not effective on this RNA substrate, so the ligation must be performed by T4 DNA ligase at low temperatures (37 degrees C.). This prevents the use of high temperature as a means of achieving specificity as in the LCR, the ligation event can be used to detect a mutation at the junction site, but not elsewhere.

[0501] A successful diagnostic method must be very specific. A straight-forward method of controlling the specificity of nucleic acid hybridization is by controlling the temperature of the reaction. While the 3SR/NASBA, and Qβ systems are all able to generate a large quantity of signal, one or more of the enzymes involved in each cannot be used at high temperature (i.e., >55 degrees C.). Therefore the reaction temperatures cannot be raised to prevent non-specific hybridization of the probes. If probes are shortened in order to make them melt more easily at low temperatures, the likelihood of having more than one perfect match in a complex genome increases. For these reasons, PCR and LCR currently dominate the research field in detection technologies.

[0502] The basis of the amplification procedure in the PCR and LCR is the fact that the products of one cycle become usable templates in all subsequent cycles, consequently doubling the population with each cycle. The final yield of any such doubling system can be expressed as: (1+X)ⁿ=y, where “X” is the mean efficiency (percent copied in each cycle), “n” is the number of cycles, and “y” is the overall efficiency, or yield of the reaction. If every copy of a target DNA is utilized as a template in every cycle of a polymerase chain reaction, then the mean efficiency is 100%. If 20 cycles of PCR are performed, then the yield will be 2²⁰, or 1,048,576 copies of the starting material. If the reaction conditions reduce the mean efficiency to 85%, then the yield in those 20 cycles will be only 1.85²⁰, or 220,513 copies of the starting material. In other words, a PCR running at 85% efficiency will yield only 21% as much final product, compared to a reaction running at 100% efficiency. A reaction that is reduced to 50% mean efficiency will yield less than 1% of the possible product.

[0503] In practice, routine polymerase chain reactions rarely achieve the theoretical maximum yield, and PCRs are usually run for more than 20 cycles to compensate for the lower yield. At 50% mean efficiency, it would take 34 cycles to achieve the million-fold amplification theoretically possible in 20, and at lower efficiencies, the number of cycles required becomes prohibitive. In addition, any background products that amplify with a better mean efficiency than the intended target will become the dominant products.

[0504] Also, many variables can influence the mean efficiency of PCR, including target DNA length and secondary structure, primer length and design, primer and dNTP concentrations, and buffer composition, to name but a few. Contamination of the reaction with exogenous DNA (e.g., DNA spilled onto lab surfaces) or cross-contamination is also a major consideration. Reaction conditions must be carefully optimized for each different primer pair and target sequence, and the process can take days, even for an experienced investigator. The laboriousness of this process, including numerous technical considerations and other factors, presents a significant drawback to using PCR in the clinical setting. Indeed, PCR has yet to penetrate the clinical market in a significant way. The same concerns arise with LCR, as LCR must also be optimized to use different oligonucleotide sequences for each target sequence. In addition, both methods require expensive equipment, capable of precise temperature cycling.

[0505] Many applications of nucleic acid detection technologies, such as in studies of allelic variation, involve not only detection of a specific sequence in a complex background, but also the discrimination between sequences with few, or single, nucleotide differences. One method of the detection of allele-specific variants by PCR is based upon the fact that it is difficult for Taq polymerase to synthesize a DNA strand when there is a mismatch between the template strand and the 3′ end of the primer. An allele-specific variant may be detected by the use of a primer that is perfectly matched with only one of the possible alleles; the mismatch to the other allele acts to prevent the extension of the primer, thereby preventing the amplification of that sequence. This method has a substantial limitation in that the base composition of the mismatch influences the ability to prevent extension across the mismatch, and certain mismatches do not prevent extension or have only a minimal effect.

[0506] A similar 3′-mismatch strategy is used with greater effect to prevent ligation in the LCR. Any mismatch effectively blocks the action of the thermostable ligase, but LCR still has the drawback of target-independent background ligation products initiating the amplification. Moreover, the combination of PCR with subsequent LCR to identify the nucleotides at individual positions is also a clearly cumbersome proposition for the clinical laboratory.

[0507] The direct detection method according to various preferred embodiments of the present invention may be, for example a cycling probe reaction (CPR) or a branched DNA analysis.

[0508] When a sufficient amount of a nucleic acid to be detected is available, there are advantages to detecting that sequence directly, instead of making more copies of that target, (e.g., as in PCR and LCR). Most notably, a method that does not amplify the signal exponentially is more amenable to quantitative analysis. Even if the signal is enhanced by attaching multiple dyes to a single oligonucleotide, the correlation between the final signal intensity and amount of target is direct. Such a system has an additional advantage that the products of the reaction will not themselves promote further reaction, so contamination of lab surfaces by the products is not as much of a concern. Recently devised techniques have sought to eliminate the use of radioactivity and/or improve the sensitivity in automatable formats. Two examples are the “Cycling Probe Reaction” (CPR), and “Branched DNA” (bDNA).

[0509] Cycling probe reaction (CPR): The cycling probe reaction (CPR), uses a long chimeric oligonucleotide in which a central portion is made of RNA while the two termini are made of DNA. Hybridization of the probe to a target DNA and exposure to a thermostable RNase H causes the RNA portion to be digested. This destabilizes the remaining DNA portions of the duplex, releasing the remainder of the probe from the target DNA and allowing another probe molecule to repeat the process. The signal, in the form of cleaved probe molecules, accumulates at a linear rate. While the repeating process increases the signal, the RNA portion of the oligonucleotide is vulnerable to RNases that may carried through sample preparation.

[0510] Branched DNA: Branched DNA (bDNA), involves oligonucleotides with branched structures that allow each individual oligonucleotide to carry 35 to 40 labels (e.g., alkaline phosphatase enzymes). While this enhances the signal from a hybridization event, signal from non-specific binding is similarly increased.

[0511] The detection of at least one sequence change according to various preferred embodiments of the present invention may be accomplished by, for example restriction fragment length polymorphism (RFLP analysis), allele specific oligonucleotide (ASO) analysis, Denaturing/Temperature Gradient Gel Electrophoresis (DGGE/TGGE), Single-Strand Conformation Polymorphism (SSCP) analysis or Dideoxy fingerprinting (ddF).

[0512] The demand for tests which allow the detection of specific nucleic acid sequences and sequence changes is growing rapidly in clinical diagnostics. As nucleic acid sequence data for genes from humans and pathogenic organisms accumulates, the demand for fast, cost-effective, and easy-to-use tests for as yet mutations within specific sequences is rapidly increasing.

[0513] A handful of methods have been devised to scan nucleic acid segments for mutations. One option is to determine the entire gene sequence of each test sample (e.g., a bacterial isolate). For sequences under approximately 600 nucleotides, this may be accomplished using amplified material (e.g., PCR reaction products). This avoids the time and expense associated with cloning the segment of interest. However, specialized equipment and highly trained personnel are required, and the method is too labor-intense and expensive to be practical and effective in the clinical setting.

[0514] In view of the difficulties associated with sequencing, a given segment of nucleic acid may be characterized on several other levels. At the lowest resolution, the size of the molecule can be determined by electrophoresis by comparison to a known standard run on the same gel. A more detailed picture of the molecule may be achieved by cleavage with combinations of restriction enzymes prior to electrophoresis, to allow construction of an ordered map. The presence of specific sequences within the fragment can be detected by hybridization of a labeled probe, or the precise nucleotide sequence can be determined by partial chemical degradation or by primer extension in the presence of chain-terminating nucleotide analogs.

[0515] Restriction fragment length polymorphism (RFLP): For detection of single-base differences between like sequences, the requirements of the analysis are often at the highest level of resolution. For cases in which the position of the nucleotide in question is known in advance, several methods have been developed for examining single base changes without direct sequencing. For example, if a mutation of interest happens to fall within a restriction recognition sequence, a change in the pattern of digestion can be used as a diagnostic tool (e.g., restriction fragment length polymorphism [RFLP] analysis).

[0516] Single point mutations have been also detected by the creation or destruction of RFLPs. Mutations are detected and localized by the presence and size of the RNA fragments generated by cleavage at the mismatches. Single nucleotide mismatches in DNA heteroduplexes are also recognized and cleaved by some chemicals, providing an alternative strategy to detect single base substitutions, generically named the “Mismatch Chemical Cleavage” (MCC). However, this method requires the use of osmium tetroxide and piperidine, two highly noxious chemicals which are not suited for use in a clinical laboratory.

[0517] RFLP analysis suffers from low sensitivity and requires a large amount of sample. When RFLP analysis is used for the detection of point mutations, it is, by its nature, limited to the detection of only those single base changes which fall within a restriction sequence of a known restriction endonuclease. Moreover, the majority of the available enzymes have 4 to 6 base-pair recognition sequences, and cleave too frequently for many large-scale DNA manipulations. Thus, it is applicable only in a small fraction of cases, as most mutations do not fall within such sites.

[0518] A handful of rare-cutting restriction enzymes with 8 base-pair specificities have been isolated and these are widely used in genetic mapping, but these enzymes are few in number, are limited to the recognition of G+C-rich sequences, and cleave at sites that tend to be highly clustered. Recently, endonucleases encoded by group I introns have been discovered that might have greater than 12 base-pair specificity, but again, these are few in number.

[0519] Allele specific oligonucleotide (ASO): If the change is not in a recognition sequence, then allele-specific oligonucleotides (ASOs), can be designed to hybridize in proximity to the mutated nucleotide, such that a primer extension or ligation event can bused as the indicator of a match or a mis-match. Hybridization with radioactively labeled allelic specific oligonucleotides (ASO) also has been applied to the detection of specific point mutations. The method is based on the differences in the melting temperature of short DNA fragments differing by a single nucleotide. Stringent hybridization and washing conditions can differentiate between mutant and wild-type alleles. The ASO approach applied to PCR products also has been extensively utilized by various researchers to detect and characterize point mutations in ras genes and gsp/gip oncogenes. Because of the presence of various nucleotide changes in multiple positions, the ASO method requires the use of many oligonucleotides to cover all possible oncogenic mutations.

[0520] With either of the techniques described above (i.e., RFLP and ASO), the precise location of the suspected mutation must be known in advance of the test. That is to say, they are inapplicable when one needs to detect the presence of a mutation within a gene or sequence of interest.

[0521] Denaturing/Temperature Gradient Gel Electrophoresis (DGGE/TGGE): Two other methods rely on detecting changes in electrophoretic mobility in response to minor sequence changes. One of these methods, termed “Denaturing Gradient Gel Electrophoresis” (DGGE) is based on the observation that slightly different sequences will display different patterns of local melting when electrophoretically resolved on a gradient gel. In this manner, variants can be distinguished, as differences in melting properties of homoduplexes versus heteroduplexes differing in a single nucleotide can detect the presence of mutations in the target sequences because of the corresponding changes in their electrophoretic mobilities. The fragments to be analyzed, usually PCR products, are “clamped” at one end by a long stretch of G-C base pairs (30-80) to allow complete denaturation of the sequence of interest without complete dissociation of the strands. The attachment of a GC “clamp” to the DNA fragments increases the fraction of mutations that can be recognized by DGGE. Attaching a GC clamp to one primer is critical to ensure that the amplified sequence has a low dissociation temperature. Modifications of the technique have been developed, using temperature gradients, and the method can be also applied to RNA:RNA duplexes.

[0522] Limitations on the utility of DGGE include the requirement that the denaturing conditions must be optimized for each type of DNA to be tested. Furthermore, the method requires specialized equipment to prepare the gels and maintain the needed high temperatures during electrophoresis. The expense associated with the synthesis of the clamping tail on one oligonucleotide for each sequence to be tested is also a major consideration. In addition, long running times are required for DGGE. The long running time of DGGE was shortened in a modification of DGGE called constant denaturant gel electrophoresis (CDGE). CDGE requires that gels be performed under different denaturant conditions in order to reach high efficiency for the detection of mutations.

[0523] A technique analogous to DGGE, termed temperature gradient gel electrophoresis (TGGE), uses a thermal gradient rather than a chemical denaturant gradient. TGGE requires the use of specialized equipment which can generate a temperature gradient perpendicularly oriented relative to the electrical field. TGGE can detect mutations in relatively small fragments of DNA therefore scanning of large gene segments requires the use of multiple PCR products prior to running the gel.

[0524] Single-Strand Conformation Polymorphism (SSCP): Another common method, called “Single-Strand Conformation Polymorphism” (SSCP) was developed by Hayashi, Sekya and colleagues and is based on the observation that single strands of nucleic acid can take on characteristic conformations in non-denaturing conditions, and these conformations influence electrophoretic mobility. The complementary strands assume sufficiently different structures that one strand may be resolved from the other. Changes in sequences within the fragment will also change the conformation, consequently altering the mobility and allowing this to be used as an assay for sequence variations.

[0525] The SSCP process involves denaturing a DNA segment (e.g., a PCR product) that is labeled on both strands, followed by slow electrophoretic separation on a non-denaturing polyacrylamide gel, so that intra-molecular interactions can form and not be disturbed during the run. This technique is extremely sensitive to variations in gel composition and temperature. A serious limitation of this method is the relative difficulty encountered in comparing data generated in different laboratories, under apparently similar conditions.

[0526] Dideoxy fingerprinting (ddF): The dideoxy fingerprinting (ddF) is another technique developed to scan genes for the presence of mutations. The ddF technique combines components of Sanger dideoxy sequencing with SSCP. A dideoxy sequencing reaction is performed using one dideoxy terminator and then the reaction products are electrophoresed on nondenaturing polyacrylamide gels to detect alterations in mobility of the termination segments as in SSCP analysis. While ddF is an improvement over SSCP in terms of increased sensitivity, ddF requires the use of expensive dideoxynucleotides and this technique is still limited to the analysis of fragments of the size suitable for SSCP (i.e., fragments of 200-300 bases for optimal detection of mutations).

[0527] In addition to the above limitations, all of these methods are limited as to the size of the nucleic acid fragment that can be analyzed. For the direct sequencing approach, sequences of greater than 600 base pairs require cloning, with the consequent delays and expense of either deletion sub-cloning or primer walking, in order to cover the entire fragment. SSCP and DGGE have even more severe size limitations. Because of reduced sensitivity to sequence changes, these methods are not considered suitable for larger fragments. Although SSCP is reportedly able to detect 90% of single-base substitutions within a 200 base-pair fragment, the detection drops to less than 50% for 400 base pair fragments. Similarly, the sensitivity of DGGE decreases as the length of the fragment reaches 500 base-pairs. The ddF technique, as a combination of direct sequencing and SSCP, is also limited by the relatively small size of the DNA that can be screened.

[0528] According to a presently preferred embodiment of the present invention the step of searching for any of the nucleic acid sequences described here, in tumor cells or in cells derived from a cancer patient is effected by any suitable technique, including, but not limited to, nucleic acid sequencing, polymerase chain reaction, ligase chain reaction, self-sustained synthetic reaction, Qβ-Replicase, cycling probe reaction, branched DNA, restriction fragment length polymorphism analysis, mismatch chemical cleavage, heteroduplex analysis, allele-specific oligonucleotides, denaturing gradient gel electrophoresis, constant denaturant gel electrophoresis, temperature gradient gel electrophoresis and dideoxy fingerprinting.

[0529] Detection may also optionally be performed with a chip or other such device. The nucleic acid sample which includes the candidate region to be analyzed is preferably isolated, amplified and labeled with a reporter group. This reporter group can be a fluorescent group such as phycoerythrin. The labeled nucleic acid is then incubated with the probes immobilized on the chip using a fluidics station. describe the fabrication of fluidics devices and particularly microcapillary devices, in silicon and glass substrates.

[0530] Once the reaction is completed, the chip is inserted into a scanner and patterns of hybridization are detected. The hybridization data is collected, as a signal emitted from the reporter groups already incorporated into the nucleic acid, which is now bound to the probes attached to the chip. Since the sequence and position of each probe immobilized on the chip is known, the identity of the nucleic acid hybridized to a given probe can be determined.

[0531] It will be appreciated that when utilized along with automated equipment, the above described detection methods can be used to screen multiple samples for a disease and/or pathological condition both rapidly and easily.

### Amino Acid Sequences and Peptides

[0532] The terms “polypeptide,” “peptide” and “protein” are used interchangeably herein to refer to a polymer of amino acid residues. The terms apply to amino acid polymers in which one or more amino acid residue is an analog or mimetic of a corresponding naturally occurring amino acid, as well as to naturally occurring amino acid polymers. Polypeptides can be modified, e.g., by the addition of carbohydrate residues to form glycoproteins. The terms “polypeptide,” “peptide” and “protein” include glycoproteins, as well as non-glycoproteins.

[0533] Polypeptide products can be biochemically synthesized such as by employing standard solid phase techniques. Such methods include but are not limited to exclusive solid phase synthesis, partial solid phase synthesis methods, fragment condensation, classical solution synthesis. These methods are preferably used when the peptide is relatively short (i.e., 10 kDa) and/or when it cannot be produced by recombinant techniques (i.e., not encoded by a nucleic acid sequence) and therefore involves different chemistry.

[0534] Solid phase polypeptide synthesis procedures are well known in the art and further described by John Morrow Stewart and Janis Dillaha Young, Solid Phase Peptide Syntheses (2nd Ed., Pierce Chemical Company, 1984).

[0535] Synthetic polypeptides can optionally be purified by preparative high performance liquid chromatography [Creighton T. (1983) Proteins, structures and molecular principles. WH Freeman and Co. N.Y.], after which their composition can be confirmed via amino acid sequencing.

[0536] In cases where large amounts of a polypeptide are desired, it can be generated using recombinant techniques such as described by Bitter et al., (1987) Methods in Enzymol. 153:516-544, Studier et al. (1990) Methods in Enzymol. 185:60-89, Brisson et al. (1984) Nature 310:511-514, Takamatsu et al. (1987) EMBO J. 6:307-311, Coruzzi et al. (1984) EMBO J. 3:1671-1680 and Brogli et al., (1984) Science 224:838-843, Gurley et al. (1986) Mol. Cell. Biol. 6:559-565 and Weissbach & Weissbach, 1988, Methods for Plant Molecular Biology, Academic Press, NY, Section VIII, pp 421-463.

[0537] The present invention also encompasses polypeptides encoded by the polynucleotide sequences of the present invention, as well as polypeptides according to the amino acid sequences described herein. The present invention also encompasses homologues of these polypeptides, such homologues can be at least 50%, at least 55%, at least 60%, at least 65%, at least 70%, at least 75%, at least 80%, at least 85%, at least 95% or more say 100% homologous to the amino acid sequences set forth below, as can be determined using BlastP software of the National Center of Biotechnology Information (NCBI) using default parameters, optionally and preferably including the following: filtering on (this option filters repetitive or low-complexity sequences from the query using the Seg (protein) program), scoring matrix is BLOSUM62 for proteins, word size is 3, E value is 10, gap costs are 11, 1 (initialization and extension), and number of alignments shown is 50. Preferably, nucleic acid sequence homology/identity is determined by using BlastN software of the National Center of Biotechnology Information (NCBI) using default parameters, which preferably include using the DUST filter program, and also preferably include having an E value of 10, filtering low complexity sequences and a word size of 11. Finally, the present invention also encompasses fragments of the above described polypeptides and polypeptides having mutations, such as deletions, insertions or substitutions of one or more amino acids, either naturally occurring or artificially induced, either randomly or in a targeted fashion.

[0538] It will be appreciated that peptides identified according the present invention may be degradation products, synthetic peptides or recombinant peptides as well as peptidomimetics, typically, synthetic peptides and peptoids and semipeptoids which are peptide analogs, which may have, for example, modifications rendering the peptides more stable while in a body or more capable of penetrating into cells. Such modifications include, but are not limited to N terminus modification, C terminus modification, peptide bond modification, including, but not limited to, CH2-NH, CH2-S, CH2-S═O, O═C—NH, CH2-O, CH2-CH2, S═C—NH, CH═CH or CF═CH, backbone modifications, and residue modification. Methods for preparing peptidomimetic compounds are well known in the art and are specified. Further details in this respect are provided hereinunder.

[0539] Peptide bonds (—CO—NH—) within the peptide may be substituted, for example, by N-methylated bonds (—N(CH3)—CO—), ester bonds (—C(R)H—C—O—O—C(R)—N—), ketomethylen bonds (—CO—CH2-), α-aza bonds (—NH—N(R)—CO—), wherein R is any alkyl, e.g., methyl, carba bonds (—CH2-NH—), hydroxyethylene bonds (—CH(OH)—CH2-), thioamide bonds (—CS—NH—), olefinic double bonds (—CH═CH—), retro amide bonds (—NH—CO—), peptide derivatives (—N(R)—CH2-CO—), wherein R is the “normal” side chain, naturally presented on the carbon atom.

[0540] These modifications can occur at any of the bonds along the peptide chain and even at several (2-3) at the same time.

[0541] Natural aromatic amino acids, Trp, Tyr and Phe, may be substituted for synthetic non-natural acid such as Phenylglycine, TIC, naphthylelanine (Nol), ring-methylated derivatives of Phe, halogenated derivatives of Phe or o-methyl-Tyr.

[0542] In addition to the above, the peptides of the present invention may also include one or more modified amino acids or one or more non-amino acid monomers (e.g. fatty acids, complex carbohydrates etc).

[0543] As used herein in the specification and in the claims section below the term “amino acid” or “amino acids” is understood to include the 20 naturally occurring amino acids; those amino acids often modified post-translationally in vivo, including, for example, hydroxyproline, phosphoserine and phosphothreonine; and other unusual amino acids including, but not limited to, 2-aminoadipic acid, hydroxylysine, isodesmosine, nor-valine, nor-leucine and ornithine. Furthermore, the term “amino acid” includes both D- and L-amino acids. Table 1 specifies non-conventional or modified amino acid which can be used with the present invention.

TABLE 1

| Non-conventional amino acid | Code | Non-conventional amino acid | Code |
|---|---|---|---|
| α-aminobutyric acid | Abu | L-N-methylalanine | Nmala |
| α-amino-α-methylbutyrate | Mgabu | L-N-methylarginine | Nmarg |
| aminocyclopropane- | Cpro | L-N-methylasparagine | Nmasn |
| Carboxylate | | L-N-methylaspartic acid | Nmasp |
| aminoisobutyric acid | Aib | L-N-methylcysteine | Nmcys |
| aminonorbornyl- | Norb | L-N-methylglutamine | Nmgin |
| Carboxylate | | L-N-methylglutamic acid | Nmglu |
| Cyclohexylalanine | Chexa | L-N-methylhistidine | Nmhis |
| Cyclopentylalanine | Cpen | L-N-methylisolleucine | Nmile |
| D-alanine | Dal | L-N-methylleucine | Nmleu |
| D-arginine | Darg | L-N-methyllysine | Nmlys |
| D-aspartic acid | Dasp | L-N-methylmethionine | Nmmet |
| D-cysteine | Dcys | L-N-methylnorleucine | Nmnle |
| D-glutamine | Dgln | L-N-methylnorvaline | Nmnva |
| D-glutamic acid | Dglu | L-N-methylornithine | Nmorn |
| D-histidine | Dhis | L-N-methylphenylalanine | Nmphe |
| D-isoleucine | Dile | L-N-methylproline | Nmpro |
| D-leucine | Dleu | L-N-methylserine | Nmser |
| D-lysine | Dlys | L-N-methylthreonine | Nmthr |
| D-methionine | Dmet | L-N-methyltryptophan | Nmtrp |
| D-ornithine | Dorn | L-N-methyltyrosine | Nmtyr |
| D-phenylalanine | Dphe | L-N-methylvaline | Nmval |
| D-proline | Dpro | L-N-methylethylglycine | Nmetg |
| D-serine | Dser | L-N-methyl-t-butylglycine | Nmtbug |
| D-threonine | Dthr | L-norleucine | Nle |
| D-tryptophan | Dtrp | L-norvaline | Nva |
| D-tyrosine | Dtyr | α-methyl-aminoisobutyrate | Maib |
| D-valine | Dval | α-methyl-γ-aminobutyrate | Mgabu |
| D-α-methylalanine | Dmala | α-methylcyclohexylalanine | Mchexa |
| D-α-methylarginine | Dmarg | α-methylcyclopentylalanine | Mcpen |
| D-α-methylasparagine | Dmasn | α-methyl-α-napthylalanine | Manap |
| D-α-methylaspartate | Dmasp | α-methylpenicillamine | Mpen |
| D-α-methylcysteine | Dmcys | N-(4-aminobutyl)glycine | Nglu |
| D-α-methylglutamine | Dmgln | N-(2-aminoethyl)glycine | Naeg |
| D-α-methylhistidine | Dmhis | N-(3-aminopropyl)glycine | Norn |
| D-α-methylisoleucine | Dmile | N-amino-α-methylbutyrate | Nmaabu |
| D-α-methylleucine | Dmleu | α-napthylalanine | Anap |
| D-α-methyllysine | Dmlys | N-benzylglycine | Nphe |
| D-α-methylmethionine | Dmmet | N-(2-carbamylethyl)glycine | Ngln |
| D-α-methylornithine | Dmorn | N-(carbamylmethyl)glycine | Nasn |
| D-α-methylphenylalanine | Dmphe | N-(2-carboxyethyl)glycine | Nglu |
| D-α-methylproline | Dmpro | N-(carboxymethyl)glycine | Nasp |
| D-α-methylserine | Dmser | N-cyclobutylglycine | Ncbut |
| D-α-methylthreonine | Dmthr | N-cycloheptylglycine | Nchep |
| D-α-methyltryptophan | Dmtrp | N-cyclohexylglycine | Nchex |
| D-α-methyltyrosine | Dmty | N-cyclodecylglycine | Ncdec |
| D-α-methylvaline | Dmval | N-cyclododeclglycine | Ncdod |
| D-α-methylalnine | Dnmala | N-cyclooctylglycine | Ncoct |
| D-α-methylarginine | Dnmarg | N-cyclopropylglycine | Ncpro |
| D-α-methylasparagine | Dnmasn | N-cycloundecylglycine | Ncund |
| D-α-methylasparatate | Dnmasp | N-(2,2-diphenylethyl)glycine | Nbhm |
| D-α-methylcysteine | Dnmcys | N-(3,3-diphenylpropyl)glycine | Nbhe |
| D-N-methylleucine | Dnmleu | N-(3-indolylyethyl) glycine | Nhtrp |
| D-N-methyllysine | Dnmlys | N-methyl-γ-aminobutyrate | Nmgabu |
| N-methylcyclohexylalanine | Nmchexa | D-N-methylmethionine | Dnmmet |
| D-N-methylornithine | Dnmorn | N-methylcyclopentylalanine | Nmcpen |
| N-methylglycine | Nala | D-N-methylphenylalanine | Dnmphe |
| N-methylaminoisobutyrate | Nmaib | D-N-methylproline | Dnmpro |
| N-(1-methylpropyl)glycine | Nile | D-N-methylserine | Dnmser |
| N-(2-methylpropyl)glycine | Nile | D-N-methylserine | Dnmser |
| N-(2-methylpropyl)glycine | Nleu | D-N-methylthreonine | Dnmthr |
| D-N-methyltryptophan | Dnmtrp | N-(1-methylethyl)glycine | Nva |
| D-N-methyltyrosine | Dnmtyr | N-methyla-napthylalanine | Nmanap |
| D-N-methylvaline | Dnmval | N-methylpenicillamine | Nmpen |
| γ-aminobutyric acid | Gabu | N-(p-hydroxyphenyl)glycine | Nhtyr |
| L-t-butylglycine | Tbug | N-(thiomethyl)glycine | Ncys |
| L-ethylglycine | Etg | penicillamine | Pen |
| L-homophenylalanine | Hphe | L-α-methylalanine | Mala |
| L-α-methylarginine | Marg | L-α-methylasparagine | Masn |
| L-α-methylaspartate | Masp | L-α-methyl-t-butylglycine | Mtbug |
| L-α-methylcysteine | Mcys | L-methylethylglycine | Metg |
| L-α-methylglutamine | Mgln | L-α-methylglutamate | Mglu |
| L-α-methylhistidine | Mhis | L-α-methylhomo phenylalanine | Mhphe |
| L-α-methylisoleucine | Mile | N-(2-methylthioethyl)glycine | Nmet |
| D-N-methylglutamine | Dnmgln | N-(3-guanidinopropyl)glycine | Narg |
| D-N-methylglutamate | Dnmglu | N-(1-hydroxyethyl)glycine | Nthr |
| D-N-methylhistidine | Dnmhis | N-(hydroxyethyl)glycine | Nser |
| D-N-methylisoleucine | Dnmile | N-(imidazolylethyl)glycine | Nhis |
| D-N-methylleucine | Dnmleu | N-(3-indolylyethyl)glycine | Nhtrp |
| D-N-methyllysine | Dnmlys | N-methyl-γ-aminobutyrate | Nmgabu |
| N-methylcyclohexylalanine | Nmchexa | D-N-methylmethionine | Dnmmet |
| D-N-methylornithine | Dnmorn | N-methylcyclopentylalanine | Nmcpen |
| N-methylglycine | Nala | D-N-methylphenylalanine | Dnmphe |
| N-methylaminoisobutyrate | Nmaib | D-N-methylproline | Dnmpro |
| N-(1-methylpropyl)glycine | Nile | D-N-methylserine | Dnmser |
| N-(2-methylpropyl)glycine | Nleu | D-N-methylthreonine | Dnmthr |
| D-N-methyltryptophan | Dnmtrp | N-(1-methylethyl)glycine | Nval |
| D-N-methyltyrosine | Dnmtyr | N-methyla-napthylalanine | Nmanap |
| D-N-methylvaline | Dnmval | N-methylpenicillamine | Nmpen |
| γ-aminobutyric acid | Gabu | N-(p-hydroxyphenyl)glycine | Nhtyr |
| L-t-butylglycine | Tbug | N-(thiomethyl)glycine | Ncys |
| L-ethylglycine | Etg | penicillamine | Pen |
| L-homophenylalanine | Hphe | L-α-methylalanine | Mala |
| L-α-methylarginine | Marg | L-α-methylasparagine | Masn |
| L-α-methylaspartate | Masp | L-α-methyl-t-butylglycine | Mtbug |
| L-α-methylcysteine | Mcys | L-methylethylglycine | Metg |
| L-α-methylglutamine | Mgln | L-α-methylglutamate | Mglu |
| L-α-methylhistidine | Mhis | L-α-methylhomophenylalanine | Mhphe |
| L-α-methylisoleucine | Mile | N-(2-methylthioethyl)glycine | Nmet |
| L-α-methylleucine | Mleu | L-α-methyllysine | Mlys |
| L-α-methylmethionine | Mmet | L-α-methylnorleucine | Mnle |
| L-α-methylnorvaline | Mnva | L-α-methylornithine | Morn |
| L-α-methylphenylalanine | Mphe | L-α-methylproline | Mpro |
| L-α-methylserine | mser | L-α-methylthreonine | Mthr |
| L-α-methylvaline | Mtrp | L-α-methyltyrosine | Mtyr |
| L-α-methylleucine | Mval Nnbhm | L-N-methylhomophenylalanine | Nmhphe |
| N-(N-(2,2-diphenylethyl) | | N-(N-(3,3-diphenylpropyl) | |
| carbamylmethyl-glycine | Nnbhm | carbamylmethyl(1)glycine | Nnbhe |
| 1-carboxy-1-(2,2-diphenyl | Nmbc | | |
| ethylamino)cyclopropane | | | |

[0544] Since the peptides of the present invention are preferably utilized in diagnostics which require the peptides to be in soluble form, the peptides of the present invention preferably include one or more non-natural or natural polar amino acids, including but not limited to serine and threonine which are capable of increasing peptide solubility due to their hydroxyl-containing side chain.

[0545] The peptides of the present invention are preferably utilized in a linear form, although it will be appreciated that in cases where cyclicization does not severely interfere with peptide characteristics, cyclic forms of the peptide can also be utilized.

[0546] The peptides of present invention can be biochemically synthesized such as by using standard solid phase techniques. These methods include exclusive solid phase synthesis well known in the art, partial solid phase synthesis methods, fragment condensation, classical solution synthesis. These methods are preferably used when the peptide is relatively short (i.e., 10 kDa) and/or when it cannot be produced by recombinant techniques (i.e., not encoded by a nucleic acid sequence) and therefore involves different chemistry.

[0547] Synthetic peptides can be purified by preparative high performance liquid chromatography and the composition of which can be confirmed via amino acid sequencing.

[0548] In cases where large amounts of the peptides of the present invention are desired, the peptides of the present invention can be generated using recombinant techniques such as described by Bitter et al., (1987) Methods in Enzymol. 153:516-544, Studier et al. (1990) Methods in Enzymol. 185:60-89, Brisson et al. (1984) Nature 310:511-514, Takamatsu et al. (1987) EMBO J. 6:307-311, Coruzzi et al. (1984) EMBO J. 3:1671-1680 and Brogli et al., (1984) Science 224:838-843, Gurley et al. (1986) Mol. Cell. Biol. 6:559-565 and Weissbach & Weissbach, 1988, Methods for Plant Molecular Biology, Academic Press, NY, Section VIII, pp 421-463 and also as described above.

### Antibodies:

[0549] “Antibody” refers to a polypeptide ligand that is preferably substantially encoded by an immunoglobulin gene or immunoglobulin genes, or fragments thereof, which specifically binds and recognizes an epitope (e.g., an antigen). The recognized immunoglobulin genes include the kappa and lambda light chain constant region genes, the alpha, gamma, delta, epsilon and mu heavy chain constant region genes, and the myriad-immunoglobulin variable region genes. Antibodies exist, e.g., as intact immunoglobulins or as a number of well characterized fragments produced by digestion with various peptidases. This includes, e.g., Fab′ and F(ab)′₂ fragments. The term “antibody,” as used herein, also includes antibody fragments either produced by the modification of whole antibodies or those synthesized de novo using recombinant DNA methodologies. It also includes polyclonal antibodies, monoclonal antibodies, chimeric antibodies, humanized antibodies, or single chain antibodies. “Fc” portion of an antibody refers to that portion of an immunoglobulin heavy chain that comprises one or more heavy chain constant region domains, CH1, CH2 and CH3, but does not include the heavy chain variable region.

[0550] The functional fragments of antibodies, such as Fab, F(ab′)2, and Fv that are capable of binding to macrophages, are described as follows: (1) Fab, the fragment which contains a monovalent antigen-binding fragment of an antibody molecule, can be produced by digestion of whole antibody with the enzyme papain to yield an intact light chain and a portion of one heavy chain; (2) Fab′, the fragment of an antibody molecule that can be obtained by treating whole antibody with pepsin, followed by reduction, to yield an intact light chain and a portion of the heavy chain; two Fab′ fragments are obtained per antibody molecule; (3) (Fab′)₂, the fragment of the antibody that can be obtained by treating whole antibody with the enzyme pepsin without subsequent reduction; F(ab′)2 is a dimer of two Fab′ fragments held together by two disulfide bonds; (4) Fv, defined as a genetically engineered fragment containing the variable region of the light chain and the variable region of the heavy chain expressed as two chains; and (5) Single chain antibody (“SCA”), a genetically engineered molecule containing the variable region of the light chain and the variable region of the heavy chain, linked by a suitable polypeptide linker as a genetically fused single chain molecule.

[0551] Methods of producing polyclonal and monoclonal antibodies as well as fragments thereof are well known in the art (See for example, Harlow and Lane, Antibodies: A Laboratory Manual, Cold Spring Harbor Laboratory, New York, 1988, incorporated herein by reference).

[0552] Monoclonal antibody development may optionally be performed according to any method that is known in the art. The method described below is provided for the purposes of description only and is not meant to be limiting in any way.

[0553] Step 1: Immunization of Mice and Selection of Mouse Donors for Generation of Hybridoma Cells:

[0554] Producing mAb requires immunizing an animal, usually a mouse, by injection of an antigen X to stimulate the production of antibodies targeted against X. Antigen X can be the whole protein or any sequence thereof that gives rise to a determinant. According to the present invention, optionally and preferably such antigens may include but are not limited to any variant described herein or a portion thereof, including but not limited to any head, tail, bridge or unique insertion, or a bridge to such head, tail or unique insertion, or any other epitope described herein according to the present invention. Injection of peptides requires peptide design (with respect to protein homology, antigenicity, hydrophilicity, and synthetic suitability) and synthesis. The antigen is optionally and preferably prepared for injection either by emulsifying the antigen with Freund's adjuvant or other adjuvants or by homogenizing a gel slice that contains the antigen. Intact cells, whole membranes, and microorganisms are sometimes optionally used as immunogens. Other immunogens or adjuvants may also optionally be used.

[0555] In general, mice are immunized every 2-3 weeks but the immunization protocols are heterogeneous. When a sufficient antibody titer is reached in serum, immunized mice are euthanized and the spleen removed to use as a source of cells for fusion with myeloma cells.

[0556] Step 2: Screening of Mice for Antibody Production

[0557] After several weeks of immunization, blood samples are optionally and preferably obtained from mice for measurement of serum antibodies. Several techniques have been developed for collection of small volumes of blood from mice (Loeb and Quimby 1999). Serum antibody titer is determined with various techniques, such as enzyme-linked immunosorbent assay (ELISA) and flow cytometry, and/or immunoassays for example (for example a Western blot may optionally be used). If the antibody titer is high, cell fusion can optionally be performed. If the titer is too low, mice can optionally be boosted until an adequate response is achieved, as determined by repeated blood sampling. When the antibody titer is high enough, mice are commonly boosted by injecting antigen without adjuvant intraperitoneally or intravenously (via the tail veins) 3 days before fusion but 2 weeks after the previous immunization. Then the mice are euthanized and their spleens removed for in vitro hybridoma cell production.

[0558] Step 3: Preparation of Myeloma Cells

[0559] Fusing antibody-producing spleen cells, which have a limited life span, with cells derived from an immortal tumor of lymphocytes (myeloma) results in a hybridoma that is capable of unlimited growth. Myeloma cells are immortalized cells that are optionally and preferably cultured with 8-azaguanine to ensure their sensitivity to the hypoxanthine-aminopterin-thymidine (HAT) selection medium used after cell fusion. The selection growth medium contains the inhibitor aminopterin, which blocks synthetic pathways by which nucleotides are made. Therefore, the cells must use a bypass pathway to synthesize nucleic acids, a pathway that is defective in the myeloma cell line to which the normal antibody-producing cells are fused. Because neither the myeloma nor the antibody-producing cell will grow on its own, only hybrid cells grow. The HAT medium allows only the fused cells to survive in culture. A week before cell fusion, myeloma cells are grown in 8-azaguanine. Cells must have high viability and rapid growth.

[0560] The antibody forming cells are isolated from the mouse's spleen and are then fused with a cancer cell (such as cells from a myeloma) to make them immortal, which means that they will grow and divide indefinitely. The resulting cell is called a hybridoma.

[0561] Step 4: Fusion of Myeloma Cells with Immune Spleen Cells and antibody screening

[0562] Single spleen cells from the immunized mouse are fused with the previously prepared myeloma cells. Fusion is accomplished by co-centrifuging freshly harvested spleen cells and myeloma cells in polyethylene glycol, a substance that causes cell membranes to fuse. Alternatively, the cells are centrifuged, the supernatant is discarded and PEG is then added. The cells are then distributed to 96 well plates containing feeder cells derived from saline peritoneal washes of mice. Feeder cells are believed to supply growth factors that promote growth of the hybridoma cells (Quinlan and Kennedy 1994). Commercial preparations that result from the collection of media supporting the growth of cultured cells and contain growth factors are available that can be used in lieu of mouse-derived feeder cells. It is also possible to use murine bone marrow-derived macrophages as feeder cells (Hoffman and others 1996).

[0563] Once hybridoma colonies reach a satisfactory cell count, the plates are assayed by an assay, eg ELISA or a regular immunoassay such as RIA for example, to determine which colonies are secreting antibodies to the immunogen. Cells from positive wells are isolated and expanded. Conditioned medium from each colony is retested to verify the stability of the hybridomas (that is, they continue to produce antibody).

[0564] Step 5: Cloning of Hybridoma Cell Lines by “Limiting Dilution” or Expansion and Stabilization of Clones by Ascites Production

[0565] At this step new, small clusters of hybridoma cells from the 96 well plates can be grown in tissue culture followed by selection for antigen binding or grown by the mouse ascites method with cloning at a later time.

[0566] For prolonged stability of the antibody-producing cell lines, it is necessary to clone and then recline the chosen cells. Cloning consists of subcloning the cells by either limiting dilution at an average of less than one cell in each culture well or by platingout the cells in a thin layer of semisolid agar of methyl cellulose or by single-cell manipulation. At each stage, cultures are assayed for production of the appropriate antibodies.

[0567] Step 6: Antibody Purification

[0568] The secreted antibodies are optionally purified, preferably by one or more column chromatography steps and/or some other purification method, including but not limited to ion exchange, affinity, hydrophobic interaction, and gel permeation chromatography. The operation of the individual chromatography step, their number and their sequence is generally tailored to the specific antibody and the specific application.

[0569] Large-scale antibody production may also optionally and preferably be performed according to the present invention. Two non-limiting, illustrative exemplary methods are described below for the purposes of description only and are not meant to be limiting in any way.

[0570] In vivo production may optionally be performed with ascites fluid in mice. According to this method, hybridoma cell lines are injected into the peritoneal cavity of mice to produce ascitic fluid (ascites) in its abdomen; this fluid contains a high concentration of antibody.

[0571] An exemplary in vitro method involves the use of culture flasks. In this method, monoclonal antibodies can optionally be produced from the hybridoma using gas permeable bags or cell culture flasks.

### Antibody Engineering in Phage Display Libraries:

[0572] PCT Application No. WO 94/18219, and its many US equivalents, including U.S. Pat. No. 6,096,551, all of which are hereby incorporated by reference as if fully set forth herein, describes methods for producing antibody libraries using universal or randomized immunoglobulin light chains, by using phage display libraries. The method involves inducing mutagenesis in a complementarity determining region (CDR) of an immunoglobulin light chain gene for the purpose of producing light chain gene libraries for use in combination with heavy chain genes and gene libraries to produce antibody libraries of diverse and novel immunospecificities. The method comprises amplifying a CDR portion of an immunoglobulin light chain gene by polymerase chain reaction (PCR) using a PCR primer oligonucleotide. The resultant gene portions are inserted into phagemids for production of a phage display library, wherein the engineered light chains are displayed by the phages, for example for testing their binding specificity.

[0573] Antibody fragments according to the present invention can be prepared by proteolytic hydrolysis of the antibody or by expression in E. coli or mammalian cells (e.g. Chinese hamster ovary cell culture or other protein expression systems) of DNA encoding the fragment. Antibody fragments can be obtained by pepsin or papain digestion of whole antibodies by conventional methods. For example, antibody fragments can be produced by enzymatic cleavage of antibodies with pepsin to provide a 5S fragment denoted F(ab′)2. This fragment can be further cleaved using a thiol reducing agent, and optionally a blocking group for the sulfhydryl groups resulting from cleavage of disulfide linkages, to produce 3.5S Fab′ monovalent fragments. Alternatively, an enzymatic cleavage using pepsin produces two monovalent Fab′ fragments and an Fc fragment directly. These methods are described, for example, by Goldenberg, U.S. Pat. Nos. 4,036,945 and 4,331,647, and references contained therein, which patents are hereby incorporated by reference in their entirety. See also Porter, R. R. [Biochem. J. 73: 119-126 (1959)]. Other methods of cleaving antibodies, such as separation of heavy chains to form monovalent light-heavy chain fragments, further cleavage of fragments, or other enzymatic, chemical, or genetic techniques may also be used, so long as the fragments bind to the antigen that is recognized by the intact antibody.

[0574] Fv fragments comprise an association of VH and VL chains. This association may be noncovalent, as described in Inbar et al. [Proc. Nat'l Acad. Sci. USA 69:2659-62 (19720]. Alternatively, the variable chains can be linked by an intermolecular disulfide bond or cross-linked by chemicals such as glutaraldehyde. Preferably, the Fv fragments comprise VH and VL chains connected by a peptide linker. These single-chain antigen binding proteins (sFv) are prepared by constructing a structural gene comprising DNA sequences encoding the VH and VL domains connected by an oligonucleotide. The structural gene is inserted into an expression vector, which is subsequently introduced into a host cell such as E. coli. The recombinant host cells synthesize a single polypeptide chain with a linker peptide bridging the two V domains. A scFv antibody fragment is an engineered antibody derivative that includes heavy- and light chain variable regions joined by a peptide linker. The minimal size of antibody molecules are those that still comprise the complete antigen binding site. ScFv antibody fragments are potentially more effective than unmodified IgG antibodies. The reduced size of 27-30 kDa permits them to penetrate tissues and solid tumors more readily. Methods for producing sFvs are described, for example, by [Whitlow and Filpula, Methods 2: 97-105 (1991); Bird et al., Science 242:423-426 (1988); Pack et al., Bio/Technology 11:1271-77 (1993); and U.S. Pat. No. 4,946,778, which is hereby incorporated by reference in its entirety.

[0575] Another form of an antibody fragment is a peptide coding for a single complementarity-determining region (CDR). CDR peptides (“minimal recognition units”) can be obtained by constructing genes encoding the CDR of an antibody of interest. Such genes are prepared, for example, by using the polymerase chain reaction to synthesize the variable region from RNA of antibody-producing cells. See, for example, Larrick and Fry [Methods, 2: 106-10 (1991)]. Optionally, there may be 1, 2 or 3 CDRs of different chains, but preferably there are 3 CDRs of 1 chain. The chain could be the heavy or the light chain.

[0576] Humanized forms of non-human (e.g., murine) antibodies are chimeric molecules of immunoglobulins, immunoglobulin chains or fragments thereof (such as Fv, Fab, Fab′, F(ab′) or other antigen-binding subsequences of antibodies) which contain minimal sequence derived from non-human immunoglobulin. Humanized antibodies include human immunoglobulins (recipient antibody) in which residues from a complementary determining region (CDR) of the recipient are replaced by residues from a CDR of a non-human species (donor antibody) such as mouse, rat or rabbit having the desired specificity, affinity and capacity. In some instances, Fv framework residues of the human immunoglobulin are replaced by corresponding non-human residues. Humanized antibodies may also comprise residues which are found neither in the recipient antibody nor in the imported CDR or framework sequences. In general, the humanized antibody will comprise substantially all of at least one, and typically two, variable domains, in which all or substantially all of the CDR regions correspond to those of a non-human immunoglobulin and all or substantially all of the FR regions are those of a human immunoglobulin consensus sequence. The humanized antibody optimally also will comprise at least a portion of an immunoglobulin constant region (Fc), typically that of a human immunoglobulin [Jones et al., Nature, 321:522-525 (1986); Riechmann et al., Nature, 332:323-329 (1988); and Presta, Curr. Op. Struct. Biol., 2:593-596 (1992)].

[0577] Methods for humanizing non-human antibodies are well known in the art. Generally, a humanized antibody has one or more amino acid residues introduced into it from a source which is nonhuman. These nonhuman amino acid residues are often referred to as import residues, which are typically taken from an import variable domain. Humanization can be essentially performed following the method of Winter and co-workers [Jones et al., Nature, 321:522-525 (1986); Riechmann et al., Nature 332:323-327 (1988); Verhoeyen et al., Science, 239:1534-1536 (1988)], by substituting rodent CDRs or CDR sequences for the corresponding sequences of a human antibody. Accordingly, such humanized antibodies are chimeric antibodies (U.S. Pat. No. 4,816,567), wherein substantially less than an intact human variable domain has been substituted by the corresponding sequence from a non-human species. In practice, humanized antibodies are typically human antibodies in which some CDR residues and possibly some FR residues are substituted by residues from analogous sites in rodent antibodies.

[0578] Human antibodies can also be produced using various techniques known in the art, including phage display libraries [Hoogenboom and Winter, J. Mol. Biol., 227:381 (1991); Marks et al., J. Mol. Biol., 222:581 (1991)]. The techniques of Cole et al. and Boerner et al. are also available for the preparation of human monoclonal antibodies (Cole et al., Monoclonal Antibodies and Cancer Therapy, Alan R. Liss, p. 77 (1985) and Boerner et al., J. Immunol., 147(1):86-95 (1991)]. Similarly, human antibodies can be made by introduction of human immunoglobulin loci into transgenic animals, e.g., mice in which the endogenous immunoglobulin genes have been partially or completely inactivated. Upon challenge, human antibody production is observed, which closely resembles that seen in humans in all respects, including gene rearrangement, assembly, and antibody repertoire. This approach is described, for example, in U.S. Pat. Nos. 5,545,807; 5,545,806; 5,569,825; 5,625,126; 5,633,425; 5,661,016, and in the following scientific publications: Marks et al., Bio/Technology 10: 779-783 (1992); Lonberg et al., Nature 368: 856-859 (1994); Morrison, Nature 368 812-13 (1994); Fishwild et al., Nature Biotechnology 14, 845-51 (1996); Neuberger, Nature Biotechnology 14: 826 (1996); and Lonberg and Huszar, Intern. Rev. Immunol. 13, 65-93 (1995).

[0579] Preferably, the antibody of this aspect of the present invention specifically binds at least one epitope of the polypeptide variants of the present invention. As used herein, the term “epitope” refers to any antigenic determinant on an antigen to which the paratope of an antibody binds.

[0580] Epitopic determinants usually consist of chemically active surface groupings of molecules such as amino acids or carbohydrate side chains and usually have specific three dimensional structural characteristics, as well as specific charge characteristics.

[0581] Optionally, a unique epitope may be created in a variant due to a change in one or more post-translational modifications, including but not limited to glycosylation and/or phosphorylation, as described below. Such a change may also cause a new epitope to be created, for example through removal of glycosylation at a particular site.

[0582] An epitope according to the present invention may also optionally comprise part or all of a unique sequence portion of a variant according to the present invention in combination with at least one other portion of the variant which is not contiguous to the unique sequence portion in the linear polypeptide itself, yet which are able to form an epitope in combination. One or more unique sequence portions may optionally combine with one or more other non-contiguous portions of the variant (including a portion which may have high homology to a portion of the known protein) to form an epitope.

### Immunoassays

[0583] In another embodiment of the present invention, an immunoassay can be used to qualitatively or quantitatively detect and analyze markers in a sample. This method comprises: providing an antibody that specifically binds to a marker; contacting a sample with the antibody; and detecting the presence of a complex of the antibody bound to the marker in the sample.

[0584] To prepare an antibody that specifically binds to a marker, purified protein markers can be used. Antibodies that specifically bind to a protein marker can be prepared using any suitable methods known in the art.

[0585] After the antibody is provided, a marker can be detected and/or quantified using any of a number of well recognized immunological binding assays. Useful assays include, for example, an enzyme immune assay (EIA) such as enzyme-linked immunosorbent assay (ELISA), a radioimmune assay (RIA), a Western blot assay, or a slot blot assay see, e.g., U.S. Pat. Nos. 4,366,241; 4,376,110; 4,517,288; and 4,837,168). Generally, a sample obtained from a subject can be contacted with the antibody that specifically binds the marker.

[0586] Optionally, the antibody can be fixed to a solid support to facilitate washing and subsequent isolation of the complex, prior to contacting the antibody with a sample. Examples of solid supports include but are not limited to glass or plastic in the form of, e.g., a microtiter plate, a stick, a bead, or a microbead.

[0587] Antibodies can also be attached to a solid support.

[0588] After incubating the sample with antibodies, the mixture is washed and the antibody-marker complex formed can be detected. This can be accomplished by incubating the washed mixture with a detection reagent. Alternatively, the marker in the sample can be detected using an indirect assay, wherein, for example, a second, labeled antibody is used to detect bound marker-specific antibody, and/or in a competition or inhibition assay wherein, for example, a monoclonal antibody which binds to a distinct epitope of the marker are incubated simultaneously with the mixture.

[0589] Throughout the assays, incubation and/or washing steps may be required after each combination of reagents. Incubation steps can vary from about 5 seconds to several hours, preferably from about 5 minutes to about 24 hours. However, the incubation time will depend upon the assay format, marker, volume of solution, concentrations and the like. Usually the assays will be carried out at ambient temperature, although they can be conducted over a range of temperatures, such as 10° C. to 40° C.

[0590] The immunoassay can be used to determine a test amount of a marker in a sample from a subject. First, a test amount of a marker in a sample can be detected using the immunoassay methods described above. If a marker is present in the sample, it will form an antibody-marker complex with an antibody that specifically binds the marker under suitable incubation conditions described above. The amount of an antibody-marker complex can optionally be determined by comparing to a standard. As noted above, the test amount of marker need not be measured in absolute units, as long as the unit of measurement can be compared to a control amount and/or signal.

[0591] Preferably used are antibodies which specifically interact with the polypeptides of the present invention and not with wild type proteins or other isoforms thereof, for example. Such antibodies are directed, for example, to the unique sequence portions of the polypeptide variants of the present invention, including but not limited to bridges, heads, tails and insertions described in greater detail below. Preferred embodiments of antibodies according to the present invention are described in greater detail with regard to the section entitled “Antibodies”.

[0592] Radio-immunoassay (RIA): In one version, this method involves precipitation of the desired substrate and in the methods detailed hereinbelow, with a specific antibody and radiolabelled antibody binding protein (e.g., protein A labeled with I¹²⁵) immobilized on a precipitable carrier such as agarose beads. The number of counts in the precipitated pellet is proportional to the amount of substrate.

[0593] In an alternate version of the RIA, a labeled substrate and an unlabelled antibody binding protein are employed. A sample containing an unknown amount of substrate is added in varying amounts. The decrease in precipitated counts from the labeled substrate is proportional to the amount of substrate in the added sample.

[0594] Enzyme linked immunosorbent assay (ELISA): This method involves fixation of a sample (e.g., fixed cells or a proteinaceous solution) containing a protein substrate to a surface such as a well of a microtiter plate. A substrate specific antibody coupled to an enzyme is applied and allowed to bind to the substrate. Presence of the antibody is then detected and quantitated by a calorimetric reaction employing the enzyme coupled to the antibody. Enzymes commonly employed in this method include horseradish peroxidase and alkaline phosphatase. If well calibrated and within the linear range of response, the amount of substrate present in the sample is proportional to the amount of color produced. A substrate standard is generally employed to improve quantitative accuracy.

[0595] Western blot: This method involves separation of a substrate from other protein by means of an acrylamide gel followed by transfer of the substrate to a membrane (e.g., nylon or PVDF). Presence of the substrate is then detected by antibodies specific to the substrate, which are in turn detected by antibody binding reagents. Antibody binding reagents may be, for example, protein A, or other antibodies. Antibody binding reagents may be radiolabelled or enzyme linked as described hereinabove. Detection may be by autoradiography, calorimetric reaction or chemiluminescence. This method allows both quantitation of an amount of substrate and determination of its identity by a relative position on the membrane which is indicative of a migration distance in the acrylamide gel during electrophoresis.

[0596] Immunohistochemical analysis: This method involves detection of a substrate in situ in fixed cells by substrate specific antibodies. The substrate specific antibodies may be enzyme linked or linked to fluorophores. Detection is by microscopy and subjective evaluation. If enzyme linked antibodies are employed, a colorimetric reaction may be required.

[0597] Fluorescence activated cell sorting (FACS): This method involves detection of a substrate in situ in cells by substrate specific antibodies. The substrate specific antibodies are linked to fluorophores. Detection is by means of a cell sorting machine which reads the wavelength of light emitted from each cell as it passes through a light beam. This method may employ two or more antibodies simultaneously.

### Radio-Imaging Methods

[0598] These methods include but are not limited to, positron emission tomography (PET) single photon emission computed tomography (SPECT). Both of these techniques are non-invasive, and can be used to detect and/or measure a wide variety of tissue events and/or functions, such as detecting cancerous cells for example. Unlike PET, SPECT can optionally be used with two labels simultaneously. SPECT has some other advantages as well, for example with regard to cost and the types of labels that can be used. For example, U.S. Pat. No. 6,696,686 describes the use of SPECT for detection of breast cancer, and is hereby incorporated by reference as if fully set forth herein.

### Display Libraries

[0599] According to still another aspect of the present invention there is provided a display library comprising a plurality of display vehicles (such as phages, viruses or bacteria) each displaying at least 6, at least 7, at least 8, at least 9, at least 10, 10-15, 12-17, 15-20, 15-30 or 20-50 consecutive amino acids derived from the polypeptide sequences of the present invention.

[0600] Methods of constructing such display libraries are well known in the art. Such methods are described in, for example, Young A C, et al., “The three-dimensional structures of a polysaccharide binding antibody to Cryptococcus neoformans and its complex with a peptide from a phage display library: implications for the identification of peptide mimotopes” J Mol Biol 1997 Dec. 12; 274(4):622-34; Giebel L B et al. “Screening of cyclic peptide phage libraries identifies ligands that bind streptavidin with high affinities” Biochemistry 1995 Nov. 28; 34(47):15430-5; Davies E L et al., “Selection of specific phage-display antibodies using libraries derived from chicken immunoglobulin genes” J Immunol Methods 1995 Oct. 12; 186(1):125-35; Jones C RT al. “Current trends in molecular recognition and bioseparation” J Chromatogr A 1995 Jul. 14; 707(1):3-22; Deng S J et al. “Basis for selection of improved carbohydrate-binding single-chain antibodies from synthetic gene libraries” Proc Natl Acad Sci USA 1995 May 23; 92(11):4992-6; and Deng S J et al. “Selection of antibody single-chain variable fragments with improved carbohydrate binding by phage display” J Biol Chem 1994 Apr. 1; 269(13):9533-8, which are incorporated herein by reference.

### Theranostics:

[0601] The term theranostics describes the use of diagnostic testing to diagnose the disease, choose the correct treatment regime according to the results of diagnostic testing and/or monitor the patient response to therapy according to the results of diagnostic testing. Theranostic tests can be used to select patients for treatments that are particularly likely to benefit them and unlikely to produce side-effects. They can also provide an early and objective indication of treatment efficacy in individual patients, so that (if necessary) the treatment can be altered with a minimum of delay. For example: DAKO and Genentech together created HercepTest and Herceptin (trastuzumab) for the treatment of breast cancer, the first theranostic test approved simultaneously with a new therapeutic drug. In addition to HercepTest (which is an immunohistochemical test), other theranostic tests are in development which use traditional clinical chemistry, immunoassay, cell-based technologies and nucleic acid tests. PPGx's recently launched TPMT (thiopurine S-methyltransferase) test, which is enabling doctors to identify patients at risk for potentially fatal adverse reactions to 6-mercaptopurine, an agent used in the treatment of leukemia. Also, Nova Molecular pioneered SNP genotyping of the apolipoprotein E gene to predict Alzheimer's disease patients' responses to cholinomimetic therapies and it is now widely used in clinical trials of new drugs for this indication. Thus, the field of theranostics represents the intersection of diagnostic testing information that predicts the response of a patient to a treatment with the selection of the appropriate treatment for that particular patient.

### Surrogate Markers:

[0602] A surrogate marker is a marker, that is detectable in a laboratory and/or according to a physical sign or symptom on the patient, and that is used in therapeutic trials as a substitute for a clinically meaningful endpoint. The surrogate marker is a direct measure of how a patient feels, functions, or survives which is expected to predict the effect of the therapy. The need for surrogate markers mainly arises when such markers can be measured earlier, more conveniently, or more frequently than the endpoints of interest in terms of the effect of a treatment on a patient, which are referred to as the clinical endpoints. Ideally, a surrogate marker should be biologically plausible, predictive of disease progression and measurable by standardized assays (including but not limited to traditional clinical chemistry, immunoassay, cell-based technologies, nucleic acid tests and imaging modalities).

[0603] Surrogate endpoints were used first mainly in the cardiovascular area. For example, antihypertensive drugs have been approved based on their effectiveness in lowering blood pressure. Similarly, in the past, cholesterol-lowering agents have been approved based on their ability to decrease serum cholesterol, not on the direct evidence that they decrease mortality from atherosclerotic heart disease. The measurement of cholesterol levels is now an accepted surrogate marker of atherosclerosis. In addition, currently two commonly used surrogate markers in HIV studies are CD4+ T cell counts and quantitative plasma HIV RNA (viral load).

### Monoclonal Antibody Therapy:

[0604] Monoclonal antibodies by identifying and binding to the target cells alert other cells in the immune system to the presence of the cancer cells. Monoclonal antibody therapy is a form of passive immunotherapy because the antibodies are made in large quantities outside the body (in the lab) rather than by a person's immune system.

[0605] Two types of monoclonal antibodies are used in cancer treatments:

[0606] 1. Naked monoclonal antibodies.

[0607] 2. Conjugated monoclonal antibodies—joined to a chemotherapy drug, radioactive particle, or a toxin (a substance that poisons cells).

[0608] 1. Naked Monoclonal Antibodies:

[0609] Naked antibodies attach themselves to specific antigens on cancer cells. They can act in different ways: some mark the cancer cell for the immune system to destroy it, while others attach to receptors and block their ligand binding site and may therefore prevent the cancer cells from growing rapidly. Trastuzumab (Herceptin), a naked MAb used against advanced breast cancer, works in that way.

[0610] 2. Conjugated Monoclonal Antibodies:

[0611] Conjugated monoclonal antibodies are joined to drugs, toxins, or radioactive atoms. They are used as delivery vehicles to take those substances directly to the cancer cells. The MAb acts as a homing device, circulating in the body until it finds a cancer cell with a matching antigen. It delivers the toxic substance to where it is needed most, minimizing damage to normal cells in other parts of the body. Conjugated MAbs are also sometimes referred to as “tagged,” “labeled,” or “loaded” antibodies. MAbs with chemotherapy drugs attached are generally referred to as chemolabeled. MAbs with radioactive particles attached are referred to as radiolabeled, and this type of therapy is known as radioimmunotherapy (RIT). MAbs attached to toxins are called immunotoxins.

[0612] An illustrative, non-limiting example is provided herein of a method of treatment of a patient with an antibody to a variant as described herein, such that the variant is a target of the antibody. A patient with breast cancer is treated with a radiolabeled humanized antibody against an appropriate breast cancer target as described herein. The patient is optionally treated with a dosage of labeled antibody ranging from 10 to 30 mCi. Of course any type of therapeutic label may optionally be used.

[0613] The following sections relate to Candidate Marker Examples. It should be noted that Table numbering is restarted within each Example, which starts with the words “Description for Cluster”.

### Candidate Marker Examples Section

[0614] This Section relates to Examples of sequences according to the present invention, including illustrative methods of selection thereof with regard to cancer; other markers were selected as described below for the individual markers.

[0615] Description of the Methodology Undertaken to Uncover the Biomolecular Sequences of the Present Invention

[0616] Human ESTs and cDNAs were obtained from GenBank versions 136 (Jun. 15, 2003 ftp.ncbi.nih.gov/genbank/release.notes/gb136.release.notes); NCBI genome assembly of April 2003; RefSeq sequences from June 2003; Genbank version 139 (December 2003); Human Genome from NCBI (Build 34) (from October 2003); and RefSeq sequences from December 2003. With regard to GenBank sequences, the human EST sequences from the EST (GBEST) section and the human mRNA sequences from the primate (GBPRI) section were used; also the human nucleotide RefSeq mRNA sequences were used (see for example www.ncbi.nlm.nih.gov/Genbank/GenbankOverview.html and for a reference to the EST section, see www.ncbi.nlm.nih.gov/dbEST/; a general reference to dbEST, the EST database in GenBank, may be found in Boguski et al, Nat Genet. 1993 August; 4(4):332-3; all of which are hereby incorporated by reference as if fully set forth herein).

[0617] Novel splice variants were predicted using the LEADS clustering and assembly system as described in Sorek, R., Ast, G. & Graur, D. Alu-containing exons are alternatively spliced. Genome Res 12, 1060-7 (2002); U.S. Pat. No. 6,625,545; and U.S. patent application Ser. No. 10/426,002, published as US20040101876 on May 27, 2004; all of which are hereby incorporated by reference as if fully set forth herein. Briefly, the software cleans the expressed sequences from repeats, vectors and immunoglobulins. It then aligns the expressed sequences to the genome taking alternatively splicing into account and clusters overlapping expressed sequences into “clusters” that represent genes or partial genes.

[0618] These were annotated using the GeneCarta (Compugen, Tel-Aviv, Israel) platform. The GeneCarta platform includes a rich pool of annotations, sequence information (particularly of spliced sequences), chromosomal information, alignments, and additional information such as SNPs, gene ontology terms, expression profiles, functional analyses, detailed domain structures, known and predicted proteins and detailed homology reports.

[0619] A brief explanation is provided with regard to the method of selecting the candidates. However, it should be noted that this explanation is provided for descriptive purposes only, and is not intended to be limiting in any way. The potential markers were identified by a computational process that was designed to find genes and/or their splice variants that are specifically expressed in cardiac tissue, as opposed to other types of tissues and also particularly as opposed to muscle tissue, by using databases of expressed sequences. Various parameters related to the information in the EST libraries, determined according to classification by library annotation, were used to assist in locating genes and/or splice variants thereof that are specifically and/or differentially expressed in heart tissues. The detailed description of the selection method and of these parameters is presented in Example 1 below.

### Part I—Cardiac Disease Markers

### Example 1

### Identification of Differentially Expressed Gene Products

### Algorithm

[0620] In order to distinguish between differentially expressed gene products and constitutively expressed genes (i.e., house keeping genes), an algorithm based on an analysis of frequencies was configured. A specific algorithm for identification of transcripts specifically expressed in heart tissue is described hereinbelow.

[0621] EST Analysis

[0622] ESTs were taken from the following main sources: libraries contained in Genbank version 136 (Jun. 15, 2003 ftp.ncbi.nih.gov/genbank/release.notes/gb136.release.notes) and Genbank version 139 (December 2003); and from the LifeSeq library of Incyte Corporation (ESTs only; Wilmington, Del., USA). With regard to GenBank sequences, the human EST sequences from the EST (GBEST) section were used.

[0623] Library annotation—EST libraries were manually classified according to:

1. Tissue origin
2. Biological source—Examples of frequently used biological sources for construction of EST libraries include cancer cell-lines; normal tissues; cancer tissues; foetal tissues; and others such as normal cell lines and pools of normal cell-lines, cancer cell-lines and combinations thereof. A specific description of abbreviations used below with regard to these tissues/cell lines etc is given above.
3. Protocol of library construction—various methods are known in the art for library construction including normalized library construction; non-normalized library construction; subtracted libraries; ORESTES and others (described in the annotation available in Genbank). It will be appreciated that at times the protocol of library construction is not indicated in the information available about that library.

[0624] The following rules were followed:

[0625] EST libraries originating from identical biological samples were considered as a single library.

[0626] EST libraries which included above-average levels of contamination, such as DNA contamination for example, were eliminated. The presence of such contamination was determined as follows. For each library, the number of unspliced ESTs that are not fully contained within other spliced sequences was counted. If the percentage of such sequences (as compared to all other sequences) was at least 4 standard deviations above the average for all libraries being analyzed, this library was tagged as being contaminated and was eliminated from further consideration in the below analysis (see also Sorek, R. & Safer, H. M. A novel algorithm for computational identification of contaminated EST libraries. Nucleic Acids Res 31, 1067-74 (2003) for further details).

[0627] Clusters (genes) having at least five sequences including at least two sequences from the tissue of interest were analyzed. Splice variants were identified by using the LEADS software package as described above.

### Example 2

### Identification of Heart Tissue Specific Genes

[0628] For detection of heart tissue specific clusters, heart tissue libraries/sequences were compared to the total number of libraries/sequences in the cluster and in Genebank, and to the relevant numbers for muscle tissue libraries/sequences. Statistical tools were employed to identify clusters that were heart tissue specific, both as compared to all other tissues and also in comparison to muscle tissue.

[0629] The algorithm—for each tested tissue T and for each tested cluster the following were examined:

[0630] 1. Each cluster includes at least 2 libraries from the tissue T. At least 3 clones (weighed—as described above) from tissue T in the cluster;

[0631] 2. The following equation was then used to determine heart tissue-specific expression as compared to expression in all tissue types for a particular cluster:

$$\frac{t}{T} / \frac{n - t - m}{N - T - M}$$

in which n is the total number of ESTs available for a cluster, while N is the total number of ESTs available in all of the libraries considered in the analysis (effectively all ESTs in Genbank, except for those that were rejected as belonging to contaminated libraries). This ratio was preferably set to be at least about 8, although optionally the ratio could be set to be at least about 5.

[0632] 3. The following equation was then used to determine heart tissue-specific expression vs. expression in skeletal muscle tissue for a particular cluster:

$$\frac{\frac{t}{T}}{\frac{m}{M}}$$

in which t represents the number of heart tissue-specific ESTs for the cluster, while T is the number of all heart tissue-specific ESTs in the analysis; m is the number of skeletal muscle tissue-specific ESTs for the cluster, while M is the number of all skeletal muscle tissue-specific ESTs in the analysis. This ratio was preferably set to be at least about 4, although optionally the ratio could be set to be at least about 2.
4. Fisher exact test P-values were computed for weighted clone counts to check that the counts are statistically significant according to the following function: F(t, T, n, N) which is the probability of a cluster actually being overexpressed in heart tissue, as compared to its overall level of expression. The P-value was preferably set to be less than about 1e-5, although optionally it could be set to be less than about 1e-3.
Selecting Candidates with Regard to Cancer

[0633] A brief explanation is provided with regard to a non-limiting method of selecting the candidates for cancer diagnostics. However, it should noted that this explanation is provided for descriptive purposes only, and is not intended to be limiting in any way. The potential markers were identified by a computational process that was designed to find genes and/or their splice variants that are over-expressed in tumor tissues, by using databases of expressed sequences. Various parameters related to the information in the EST libraries, determined according to a manual classification process, were used to assist in locating genes and/or splice variants thereof that are over-expressed in cancerous tissues. The detailed description of the selection method is presented in Example 1 below. The cancer biomarkers selection engine and the following wet validation stages are schematically summarized in FIG. 1.

### Part II—Cancer Markers

### Example 1

### Identification of Differentially Expressed Gene Products

### Algorithm

[0634] In order to distinguish between differentially expressed gene products and constitutively expressed genes (i.e., house keeping genes) an algorithm based on an analysis of frequencies was configured. A specific algorithm for identification of transcripts over expressed in cancer is described hereinbelow.

[0635] Dry Analysis

[0636] Library annotation—EST libraries are manually classified according to:
[0637] (i) Tissue origin
[0638] (ii) Biological source—Examples of frequently used biological sources for construction of EST libraries include cancer cell-lines; normal tissues; cancer tissues; fetal tissues; and others such as normal cell lines and pools of normal cell-lines, cancer cell-lines and combinations thereof. A specific description of abbreviations used below with regard to these tissues/cell lines etc is given above.
[0639] (iii) Protocol of library construction—various methods are known in the art for library construction including normalized library construction; non-normalized library construction; subtracted libraries; ORESTES and others. It will be appreciated that at times the protocol of library construction is not indicated.

[0640] The following rules are followed:

[0641] EST libraries originating from identical biological samples are considered as a single library.

[0642] EST libraries which include above-average levels of DNA contamination are eliminated.

[0643] Dry computation—development of engines which are capable of identifying genes and splice variants that are temporally and spacially expressed.

[0644] Clusters (genes) having at least five sequences including at least two sequences from the tissue of interest are analyzed.

### Example 2

### Identification of Genes Over Expressed in Cancer

[0645] Two different scoring algorithms were developed.

[0646] Libraries score—candidate sequences which are supported by a number of cancer libraries, are more likely to serve as specific and effective diagnostic markers.

[0647] The basic algorithm—for each cluster the number of cancer and normal libraries contributing sequences to the cluster was counted. Fisher exact test was used to check if cancer libraries are significantly over-represented in the cluster as compared to the total number of cancer and normal libraries.

[0648] Library counting: Small libraries (e.g., less than 1000 sequences) were excluded from consideration unless they participate in the cluster. For this reason, the total number of libraries is actually adjusted for each cluster.

[0649] Clones no. score—Generally, when the number of ESTs is much higher in the cancer libraries relative to the normal libraries it might indicate actual over-expression.

[0650] The algorithm—

[0651] Clone counting: For counting EST clones each library protocol class was given a weight based on our belief of how much the protocol reflects actual expression levels:

[0652] (i) non-normalized: 1

[0653] (ii) normalized: 0.2

[0654] (iii) all other classes: 0.1

[0655] Clones number score—The total weighted number of EST clones from cancer libraries was compared to the EST clones from normal libraries. To avoid cases where one library contributes to the majority of the score, the contribution of the library that gives most clones for a given cluster was limited to 2 clones.

[0656] The score was computed as

$$\frac{\frac{c + 1}{C}}{\frac{n + 1}{N}}$$

[0657] where:

[0658] c—weighted number of “cancer” clones in the cluster.

[0659] C—weighted number of clones in all “cancer” libraries.

[0660] n—weighted number of “normal” clones in the cluster.

[0661] N—weighted number of clones in all “normal” libraries.

[0662] Clones number score significance—Fisher exact test was used to check if EST clones from cancer libraries are significantly over-represented in the cluster as compared to the total number of EST clones from cancer and normal libraries.

[0663] Two search approaches were used to find either general cancer-specific candidates or tumor specific candidates.
[0664] Libraries/sequences originating from tumor tissues are counted as well as libraries originating from cancer cell-lines (“normal” cell-lines were ignored).
[0665] Only libraries/sequences originating from tumor tissues are counted

### Example 3

### Identification of Tissue Specific Genes

[0666] For detection of tissue specific clusters, tissue libraries/sequences were compared to the total number of libraries/sequences in cluster. Similar statistical tools to those described in above were employed to identify tissue specific genes. Tissue abbreviations are the same as for cancerous tissues, but are indicated with the header “normal tissue”.

[0667] The algorithm—for each tested tissue T and for each tested cluster the following were examined:

[0668] 1. Each cluster includes at least 2 libraries from the tissue T. At least 3 clones (weighed—as described above) from tissue T in the cluster; and

[0669] 2. Clones from the tissue T are at least 40% from all the clones participating in the tested cluster

[0670] Fisher exact test P-values were computed both for library and weighted clone counts to check that the counts are statistically significant.

### Example 4

### Identification of Splice Variants Over Expressed in Cancer of Clusters which are not Over Expressed in Cancer

[0671] Cancer-Specific Splice Variants Containing a Unique Region were Identified.

[0672] Identification of Unique Sequence Regions in Splice Variants

[0673] A Region is defined as a group of adjacent exons that always appear or do not appear together in each splice variant.

[0674] A “segment” (sometimes referred also as “seg” or “node”) is defined as the shortest contiguous transcribed region without known splicing inside.

[0675] Only reliable ESTs were considered for region and segment analysis. An EST was defined as unreliable if:

[0676] (i) Unspliced;

[0677] (ii) Not covered by RNA;

[0678] (iii) Not covered by spliced ESTs; and

[0679] (iv) Alignment to the genome ends in proximity of long poly-A stretch or starts in proximity of long poly-T stretch.

[0680] Only reliable regions were selected for further scoring. Unique sequence regions were considered reliable if:

[0681] (i) Aligned to the genome; and

[0682] (ii) Regions supported by more than 2 ESTs.

[0683] The algorithm

[0684] Each unique sequence region divides the set of transcripts into 2 groups:

[0685] (i) Transcripts containing this region (group TA).

[0686] (ii) Transcripts not containing this region (group TB).

[0687] The set of EST clones of every cluster is divided into 3 groups:

[0688] (i) Supporting (originating from) transcripts of group TA (S1).

[0689] (ii) Supporting transcripts of group TB (S2).

[0690] (iii) Supporting transcripts from both groups (S3).

[0691] Library and clones number scores described above were given to S1 group.

[0692] Fisher Exact Test P-values were used to check if:

[0693] S1 is significantly enriched by cancer EST clones compared to S2; and

[0694] S1 is significantly enriched by cancer EST clones compared to cluster background (S1+S2+S3).

[0695] Identification of unique sequence regions and division of the group of transcripts accordingly is illustrated in FIG. 2. Each of these unique sequence regions corresponds to a segment, also termed herein a “node”.

Region 1: common to all transcripts, thus it is not considered; Region 2: specific to Transcript 1: T_{—}1 unique regions (2+6) against T_{—}2+3 unique regions (3+4); Region 3: specific to Transcripts 2+3: T_{—}2+3 unique regions (3+4) against TI unique regions (2+6); Region 4: specific to Transcript 3: T_{—}3 unique regions (4) against T1+2 unique regions (2+5+6); Region 5: specific to Transcript 1+2: T_{—}1+2 unique regions (2+5+6) against T3 unique regions (4); Region 6: specific to Transcript 1: same as region 2.

### Example 5

### Identification of Cancer Specific Splice Variants of Genes Over Expressed in Cancer

[0696] A search for EST supported (no mRNA) regions for genes of:

[0697] (i) known cancer markers

[0698] (ii) Genes shown to be over-expressed in cancer in published micro-array experiments.

[0699] Reliable EST supported-regions were defined as supported by minimum of one of the following:

[0700] (i) 3 spliced ESTs; or

[0701] (ii) 2 spliced ESTs from 2 libraries;

[0702] (iii) 10 unspliced ESTs from 2 libraries, or

[0703] (iv) 3 libraries.

[0704] Oligonucleotide-Based Micro-Array Experiment Protocol—

### Microarray Fabrication

[0705] Microarrays (chips) were printed by pin deposition using the MicroGrid II MGII 600 robot from BioRobotics Limited (Cambridge, UK). 50-mer oligonucleotides target sequences were designed by Compugen Ltd (Tel-Aviv, Ill.) as described by A. Shoshan et al, “Optical technologies and informatics”, Proceedings of SPIE. Vol 4266, pp. 86-95 (2001). The designed oligonucleotides were synthesized and purified by desalting with the Sigma-Genosys system (The Woodlands, Tex., US) and all of the oligonucleotides were joined to a C6 amino-modified linker at the 5′ end, or being attached directly to CodeLink slides (Cat #25-6700-01. Amersham Bioscience, Piscataway, N.J., US). The 50-mer oligonucleotides, forming the target sequences, were first suspended in Ultra-pure DDW (Cat #01-866-1A Kibbutz Beit-Haemek, Israel) to a concentration of 50 μM. Before printing the slides, the oligonucleotides were resuspended in 300 mM sodium phosphate (pH 8.5) to final concentration of 150 mM and printed at 35-40% relative humidity at 21° C.

[0706] Each slide contained a total of 9792 features in 32 subarrays. Of these features, 4224 features were sequences of interest according to the present invention and negative controls that were printed in duplicate. An additional 288 features (96 target sequences printed in triplicate) contained housekeeping genes from Human Evaluation Library2, Compugen Ltd, Israel. Another 384 features are E. coli spikes 1-6, which are oligos to E-Coli genes which are commercially available in the Array Control product (Array control—sense oligo spots, Ambion Inc. Austin, Tex. Cat #1781, Lot #112K06).

### Post-Coupling Processing of Printed Slides

[0707] After the spotting of the oligonucleotides to the glass (CodeLink) slides, the slides were incubated for 24 hours in a sealed saturated NaCl humidification chamber (relative humidity 70-75%).

[0708] Slides were treated for blocking of the residual reactive groups by incubating them in blocking solution at 50° C. for 15 minutes (10 ml/slide of buffer containing 0.1M Tris, 50 mM ethanolamine, 0.1% SDS). The slides were then rinsed twice with Ultra-pure DDW (double distilled water). The slides were then washed with wash solution (10 ml/slide. 4×SSC, 0.1% SDS)) at 50° C. for 30 minutes on the shaker. The slides were then rinsed twice with Ultra-pure DDW, followed by drying by centrifugation for 3 minutes at 800 rpm.

[0709] Next, in order to assist in automatic operation of the hybridization protocol, the slides were treated with Ventana Discovery hybridization station barcode adhesives. The printed slides were loaded on a Bio-Optica (Milan, Italy) hematology staining device and were incubated for 10 minutes in 50 ml of 3-Aminopropyl Triethoxysilane (Sigma A3648 lot #122K589). Excess fluid was dried and slides were then incubated for three hours in 20 mm/Hg in a dark vacuum desiccator (Pelco 2251, Ted Pella, Inc. Redding Calif.).

[0710] The following protocol was then followed with the Genisphere 900-RP (random primer), with mini elute columns on the Ventana Discovery HybStation™, to perform the microarray experiments. Briefly, the protocol was performed as described with regard to the instructions and information provided with the device itself. The protocol included cDNA synthesis and labeling. cDNA concentration was measured with the TBS-380 (Turner Biosystems. Sunnyvale, Calif.) PicoFlour, which is used with the OliGreen ssDNA Quantitation reagent and kit.

Hybridization was performed with the Ventana Hybridization device, according to the provided protocols (Discovery Hybridization Station Tuscon Ariz.).

[0711] The slides were then scanned with GenePix 4000B dual laser scanner from Axon Instruments Inc, and analyzed by GenePix Pro 5.0 software.

[0712] Schematic summary of the oligonucleotide based microarray fabrication and the experimental flow is presented in FIGS. 3 and 4.

[0713] Briefly, as shown in FIG. 3, DNA oligonucleotides at 25 uM were deposited (printed) onto Amersham ‘CodeLink’ glass slides generating a well defined ‘spot’. These slides are covered with a long-chain, hydrophilic polymer chemistry that creates an active 3-D surface that covalently binds the DNA oligonucleotides 5′-end via the

C6-amine modification. This binding ensures that the full length of the DNA oligonucleotides is available for hybridization to the cDNA and also allows lower background, high sensitivity and reproducibility.

[0714] FIG. 4 shows a schematic method for performing the microarray experiments. It should be noted that stages on the left-hand or right-hand side may optionally be performed in any order, including in parallel, until stage 4 (hybridization). Briefly, on the left-hand side, the target oligonucleotides are being spotted on a glass microscope slide (although optionally other materials could be used) to form a spotted slide (stage 1). On the right hand side, control sample RNA and cancer sample RNA are Cy3 and Cy5 labeled, respectively (stage 2), to form labeled probes. It should be noted that the control and cancer samples come from corresponding tissues (for example, normal prostate tissue and cancerous prostate tissue). Furthermore, the tissue from which the RNA was taken is indicated below in the specific examples of data for particular clusters, with regard to overexpression of an oligonucleotide from a “chip” (microarray), as for example “prostate” for chips in which prostate cancerous tissue and normal tissue were tested as described above. In stage 3, the probes are mixed. In stage 4, hybridization is performed to form a processed slide. In stage 5, the slide is washed and scanned to form an image file, followed by data analysis in stage 6.

[0715] Diseases and Conditions that May be Diagnosed with One or More Variant(s) According to the Present Invention

### Cardiovascular and Cerebrovascular Conditions

[0716] Various examples are listed below for conditions that affect the vascular system, including various cardiovascular and cerebrovascular conditions, for which one or more variants according to the present invention may have a diagnostic utility.

### Myocardial Infarction

[0717] N56180 variants, S67314 variants, HUMNATPEP variants, HUMCDDANF variants, HSACMHCP variants, HSCREACT variants and/or Z3624 variants are potential markers for myocardial infarction. Other conditions that may be diagnosed by these markers or variants of them include but are not limited to the presence, risk and/or extent of the following:
[0718] 1. Myocarditis—in myocarditis cardiac muscle cells can go through cell lysis and leakage with the release of intracellular content to the extracellular space and blood, a similar process as happens in myocardial infarction (see also extended description below).
[0719] 2. Angina—stable or unstable, as the reduction of oxygen delivery to part of the heart often leads to local ischemic conditions that facilitate leakage of intracellular content.
[0720] 3. Traumatic injury to myocardial tissue—blunt or penetrating, may also result in myocardial cell leakage.
[0721] 4. Opening an occluded coronary artery following thrombolytic therapy—If such treatment is successful, proteins and other products of the local tissue are washed into the blood and can be detected there.
[0722] 5. Cardiomyopathy—which is characterized by slow degeneration of the heart muscle (see also extended description below).
[0723] 6. Myocardial injury after rejection of heart transplant.
[0724] 7. Congestive heart failure where heart myocytes slowly degenerate (as had been shown for Troponin-I; see also extended description below).
[0725] 8. Future cardiovascular disease (as a risk factor).
[0726] 9. Conditions which have similar clinical symptoms as myocardial infarction and where the differential diagnosis between them and myocardial infarction is of clinical importance including but not limited to:
   [0727] a. Clinical symptoms resulting from lung related tissue (e.g. Pleuritis, pulmonary embolism)
   [0728] b. Musculoskeletal origin of pain
   [0729] c. Clinical symptoms resulting from heart related tissue which are not due to myocardial infarction, e.g. acute pericarditis
   [0730] d. Upper abdominal pain from abdominal organs including but nor limited to esophagitis, gastro-esophageal reflux, gastritis, gastric ulcer, duodenitis, duodenal ulcer, enteritis, gastroenteritis, cholecystitis, cholelithiasis, cholangiolithiasis, pancreatitis, splenic infarction, splenic trauma, Aortic dissection.

[0731] One or more of these markers (variants according to the present invention) may optionally be used a tool to decide on treatment options e.g. anti platelet inhibitors (as has been shown for Troponin-I); as a tool in the assessment of pericardial effusion; and/or as a tool in the assessment of endocarditis and/or rheumatic fever, where progressive damage to the heart muscle may occur.

### Acute and Chronic Inflammation and Risk Factors for CVS Diseases

[0732] N56180 variants, S67314 variants, HUMNATPEP variants, HUMCDDANF variants, HSACMHCP variants, HSCREACT variants and/or Z3624 variants are potential markers for inflammation, including a spectrum of diseases where an inflammatory process plays a substantial role. In addition CRP levels and in particular baseline levels serve as a risk factor for various diseases, particularly cardiovascular diseases where inflammation is thought to participate in the pathogenesis. Conditions that may be diagnosed by these markers or variants of them include but are not limited to the presence, risk and/or extent of the following:
[0733] 1. Conditions that entail an inflammatory process that involves blood vessels including but not limited to hypercholesterolemia, diabetes, atherosclerosis, inflammation that involves blood vessels—whether acute or chronic including but not limited to the coronary arteries and blood vessels of the brain, myocardial infarction, cerebral stroke, peripheral vascular disease, vasculitis, polyarteritis nodosa, ANCA associated small vessel vasculitis, Churg-Strauss syndrome, Henoch-Schonlein purpura, scleroderma, thromboangiitis obliterans, temporal arteritis, Takayasu's arteritis, hypersensitivity vasculitis, Kawasaki disease, Behçet syndrome, and their complications including but not limited to coronary disease, angina pectoris, deep vein thrombosis, renal disease, diabetic nephropathy, lupus nephritis, renal artery thrombosis, renal artery stenosis, atheroembolic disease of the renal arteries, renal vein thrombosis, hemolytic uremic syndrome, thrombotic thrombocytopenic purpura, arteriolar nephrosclerosis, preeclampsia, eclampsia, albuminuria, microalbuminuria, glomerulonephritis, renal failure, hypertension, uremia, cerebrovascular disease, peripheral vascular disease, intermittent claudication, abdominal angina.
[0734] 2. Rheumatic/autoimmune diseases that involve systemic immune reaction including but not limited to rheumatoid arthritis, scleroderma, mixed connective tissue disease, Sjogren syndrome, ankylosing spondylitis, spondyloarthropathy, psoriasis, psoriatic arthritis, myositis and systemic lupus erythematosus.
[0735] 3. Acute and/or chronic infective processes that involve systemic immune reaction including but not limited to pneumonia, bacteremia, sepsis, pyelonephritis, cellulitis, osteomyelitis, meningitis and viral hepatitis.
[0736] 4. Malignant and idiopathic processes that involve systemic immune reaction and/or proliferation of immune cells including but not limited to granulomatous disorders, Wegener's granulomatosis, lymphomatoid granulomatosis/polymorphic reticulosis, idiopathic midline granuloma, multiple myeloma, Waldenstrom's macroglobulinemia, Castleman's disease, amyloidosis, lymphoma, histiocytosis, renal cell carcinoma and paraneoplastic syndromes.
[0737] 5. Conditions where CRP was shown to have a positive correlation with the presence of the condition including but not limited to weight loss, anorexia-cachexia syndrome, extent of disease, recurrence in advanced cancer, diabetes (types 1 & 2), obesity, hypertension, preterm delivery.
[0738] 6. Conditions which have similar symptoms, signs and complications as the conditions above and where the differential diagnosis between them and the conditions above is of clinical importance including but not limited to:
   [0739] a. Other (non vascular) causes of heart disease, renal disease and cerebral disease.
   [0740] b. Other (non rheumatic) causes of arthropathy and musculoskeletal pain.
   [0741] c. Other causes of non-specific symptoms and signs such as fever of unknown origin, loss of appetite, weight loss, nonspecific pains, breathing difficulties and anxiety.

### Stroke

[0742] Stroke is a manifestation of vascular injury to the brain which is commonly secondary to atherosclerosis or hypertension, and is the third leading cause of death (and the second most common cause of neurologic disability) in the United States. Preferred marker(s) for diagnosis of stroke and related conditions as described herein may optionally be selected from the group consisting of IL-1ra, C-reactive protein (CRP) or variants thereof as described herein with regard to cluster HSCREACT, von Willebrand factor (vWF), vascular endothelial growth factor (VEGF) or variants thereof as described with regard to U.S. Pat. No. 6,783,954 (previously incorporated by reference), matrix metalloprotease-9 (MMP-9), neural cell adhesion molecule (NCAM) or variants thereof as described with regard to PCT Application No. WO 01/29215 (incorporated by reference as if fully set forth herein), BNP or variants thereof as described herein with regard to cluster HUMNATPEP, markers from cluster N56180, S67314, HUMCDDANF and/or HSACMHCP, and caspase-3, or markers related thereto.

[0743] Stroke is a pathological condition with acute onset that is caused by the occlusion or rupture of a vessel supplying blood, and thus oxygen and nutrients, to the brain. The immediate area of injury is referred to as the “core,” which contains brain cells that have died as a result of ischemia or physical damage. The “penumbra” is composed of brain cells that are neurologically or chemically connected to cells in the core. Cells within the penumbra are injured, but still have the ability to completely recover following removal of the insult caused during stroke. However, as ischemia or bleeding from hemorrhage continues, the core of dead cells can expand from the site of insult, resulting in a concurrent expansion of cells in the penumbra. The initial volume and rate of core expansion is related to the severity of the stroke and, in most cases, neurological outcome.

[0744] The brain contains two major types of cells, neurons and glial cells. Neurons are the most important cells in the brain, and are responsible for maintaining communication within the brain via electrical and chemical signaling. Glial cells function mainly as structural components of the brain, and they are approximately 10 times more abundant than neurons. Glial cells of the central nervous system (CNS) are astrocytes and oligodendrocytes. Astrocytes are the major interstitial cells of the brain, and they extend cellular processes that are intertwined with and surround neurons, isolating them from other neurons. Astrocytes can also form “end feet” at the end of their processes that surround capillaries. Oligodendrocytes are cells that form myelin sheathes around axons in the CNS. Each oligodendrocyte has the ability to ensheathe up to 50 axons. Schwann cells are glial cells of the peripheral nervous system (PNS). Schwann cells form myelin sheathes around axons in the periphery, and each Schwann cell ensheathes a single axon.

[0745] Cell death during stroke occurs as a result of ischemia or physical damage to the cells of the CNS. During ischemic stroke, an infarct occurs, greatly reducing or stopping blood flow beyond the site of infarction. The zone immediately beyond the infarct soon lacks suitable blood concentrations of the nutrients essential for cell survival. Cells that lack nutrients essential for the maintenance of important functions like metabolism soon perish. Hemorrhagic stroke can induce cell death by direct trauma, elevation in intracranial pressure, and the release of damaging biochemical substances in blood. When cells die, they release their cytosolic contents into the extracellular milieu.

[0746] The barrier action of tight junctions between the capillary endothelial cells of the central nervous system is referred to as the “blood-brain barrier”. This barrier is normally impermeable to proteins and other molecules, both large and small. In other tissues such as skeletal, cardiac, and smooth muscle, the junctions between endothelial cells are loose enough to allow passage of most molecules, but not proteins.

[0747] Substances that are secreted by the neurons and glial cells (intracellular brain compartment) of the central nervous system (CNS) can freely pass into the extracellular milieu (extracellular brain compartment). Likewise, substances from the extracellular brain compartment can pass into the intracellular brain compartment. The passage of substances between the intracellular and extracellular brain compartments are restricted by the normal cellular mechanisms that regulate substance entry and exit. Substances that are found in the extracellular brain compartment also are able to pass freely into the cerebrospinal fluid, and vice versa. This movement is controlled by diffusion.

[0748] The movement of substances between the vasculature and the CNS is restricted by the blood-brain barrier. This restriction can be circumvented by facilitated transport mechanisms in the endothelial cells that transport, among other substances, nutrients like glucose and amino acids across the barrier for consumption by the cells of the CNS. Furthermore, lipid-soluble substances such as molecular oxygen and carbon dioxide, as well as any lipid-soluble drugs or narcotics can freely diffuse across the blood-brain barrier.

[0749] Depending upon their size, specific markers of neural tissue injury that are released from injured brain cells during stroke or other neuropathies will only be found in peripheral blood when CNS injury is coupled with or followed by an increase in the permeability of the blood-brain barrier. This is particularly true of larger molecules. Smaller molecules may appear in the peripheral blood as a result of passive diffusion, active transport, or an increase in the permeability of the blood-brain barrier. Increases in blood-brain barrier permeability can arise as a result of physical disruption in cases such as tumor invasion and extravasation or vascular rupture, or as a result of endothelial cell death due to ischemia. During stroke, the blood-brain barrier is compromised by endothelial cell death, and any cytosolic components of dead cells that are present within the local extracellular milieu can enter the bloodstream.

[0750] Therefore, specific markers of neural tissue injury may also be found in the blood or in blood components such as serum and plasma, as well as the CSF of a patient experiencing stroke or TIAs. Furthermore, clearance of the obstructing object in ischemic stroke can cause injury from oxidative insult during reperfusion, and patients with ischemic stroke can sometimes experience hemorrhagic transformation as a result of reperfusion or thrombolytic therapy. Additionally, injury can be caused by vasospasm, which is a focal or diffuse narrowing of the large capacity arteries at the base of the brain following hemorrhage. The increase in blood-brain barrier permeability is related to the insult severity, and its integrity is reestablished following the resolution of insult. Specific markers of neural tissue injury will only be present in peripheral blood if there has been a sufficient increase in the permeability of the blood-brain barrier that allows these large molecules to diffuse across. In this regard, most specific markers of neural tissue injury can be found in cerebrospinal fluid after stroke or any other neuropathy that affects the CNS. Furthermore, many investigations of coagulation or fibrinolysis markers in stroke are performed using cerebrospinal fluid.

[0751] The coagulation cascade in stroke is now described. There are essentially two mechanisms that are used to halt or prevent blood loss following vessel injury. The first mechanism involves the activation of platelets to facilitate adherence to the site of vessel injury. The activated platelets then aggregate to form a platelet plug that reduces or temporarily stops blood loss. The processes of platelet aggregation, plug formation and tissue repair are all accelerated and enhanced by numerous factors secreted by activated platelets. Platelet aggregation and plug formation is mediated by the formation of a fibrinogen bridge between activated platelets. Concurrent activation of the second mechanism, the coagulation cascade, results in the generation of fibrin from fibrinogen and the formation of an insoluble fibrin clot that strengthens the platelet plug.

[0752] The coagulation cascade is an enzymatic pathway that involves numerous serine proteinases normally present in an inactive, or zymogen, form. The presence of a foreign surface in the vasculature or vascular injury results in the activation of the intrinsic and extrinsic coagulation pathways, respectively. A final common pathway is then followed, which results in the generation of fibrin by the serine proteinase thrombin and, ultimately, a crosslinked fibrin clot. In the coagulation cascade, one active enzyme is formed initially, which can activate other enzymes that active others, and this process, if left unregulated, can continue until all coagulation enzymes are activated. Fortunately, there are mechanisms in place, including fibrinolysis and the action of endogenous proteinase inhibitors that can regulate the activity of the coagulation pathway and clot formation.

[0753] Fibrinolysis is the process of proteolytic clot dissolution. In a manner analogous to coagulation, fibrinolysis is mediated by serine proteinases that are activated from their zymogen form. The serine proteinase plasmin is responsible for the degradation of fibrin into smaller degradation products that are liberated from the clot, resulting in clot dissolution. Fibrinolysis is activated soon after coagulation in order to regulate clot formation. Endogenous serine proteinase inhibitors also function as regulators of fibrinolysis.

[0754] The presence of a coagulation or fibrinolysis marker in cerebrospinal fluid would indicate that activation of coagulation or fibrinolysis, depending upon the marker used, coupled with increased permeability of the blood-brain barrier has occurred. In this regard, more definitive conclusions regarding the presence of coagulation or fibrinolysis markers associated with acute stroke may be obtained using cerebrospinal fluid.

[0755] Platelets are round or oval disks with an average diameter of 2-4 microns that are normally found in blood at a concentration of 200,000-300,000/microliter. They play an essential role in maintaining hemostasis by maintaining vascular integrity, initially stopping bleeding by forming a platelet plug at the site of vascular injury, and by contributing to the process of fibrin formation to stabilize the platelet plug. When vascular injury occurs, platelets adhere to the site of injury and each other and are stimulated to aggregate by various agents released from adherent platelets and injured endothelial cells. This is followed by the release reaction, in which platelets secrete the contents of their intracellular granules, and formation of the platelet plug. The formation of fibrin by thrombin in the coagulation cascade allows for consolidation of the plug, followed by clot retraction and stabilization of the plug by crosslinked fibrin. Active thrombin, generated in the concurrent coagulation cascade, also has the ability to induce platelet activation and aggregation.

[0756] The coagulation cascade can be activated through either the extrinsic or intrinsic pathways. These enzymatic pathways share one final common pathway. The result of coagulation activation is the formation of a crosslinked fibrin clot. Fibrinolysis is the process of proteolytic clot dissolution that is activated soon after coagulation activation, perhaps in an effort to control the rate and amount of clot formation. Urokinase-type plasminogen activator (uPA) and tissue-type plasminogen activator (tPA) proteolytically cleave plasminogen, generating the active serine proteinase plasmin. Plasmin proteolytically digests crosslinked fibrin, resulting in clot dissolution and the production and release of fibrin degradation products.

[0757] The first step of the common pathway of the coagulation cascade involves the proteolytic cleavage of prothrombin by the factor Xa/factor Va prothrombinase complex to yield active thrombin. Thrombin is a serine proteinase that proteolytically cleaves fibrinogen to form fibrin, which is ultimately integrated into a crosslinked network during clot formation.

[0758] Stroke can be categorized into two broad types, “ischemic stroke” and “hemorrhagic stroke.” Additionally, a patient may experience transient ischemic attacks, which are in turn a high risk factor for the future development of a more severe episode.

[0759] Ischemic stroke encompasses thrombotic, embolic, lacunar and hypoperfusion types of strokes. Thrombi are occlusions of arteries created in situ within the brain, while emboli are occlusions caused by material from a distant source, such as the heart and major vessels, often dislodged due to myocardial infarct or atrial fibrillation. Less frequently, thrombi may also result from vascular inflammation due to disorders such as meningitis. Thrombi or emboli can result from atherosclerosis or other disorders, for example, arteritis, and lead to physical obstruction of arterial blood supply to the brain. Lacunar stroke refers to an infarct within non-cortical regions of the brain. Hypoperfusion embodies diffuse injury caused by non-localized cerebral ischemia, typically caused by myocardial infarction and arrhythmia.

[0760] The onset of ischemic stroke is often abrupt, and can become an “evolving stroke” manifested by neurologic deficits that worsen over a 24-48 hour period. In evolving stroke, “stroke-associated symptom(s)” commonly include unilateral neurologic dysfunction which extends progressively, without producing headache or fever. Evolving stroke may also become a “completed stroke,” in which symptoms develop rapidly and are maximal within a few minutes.

[0761] Hemorrhagic stroke is caused by intracerebral or subarachnoid hemorrhage, i.e., bleeding into brain tissue, following blood vessel rupture within the brain. Intracerebral and subarachnoid hemorrhage are subsets of a broader category of hemorrhage referred to as intracranial hemorrhage. Intracerebral hemorrhage is typically due to chronic hypertension, and a resulting rupture of an arteriosclerotic vessel. Stroke-associated symptom(s) of intracerebral hemorrhage are abrupt, with the onset of headache and steadily increasing neurological deficits. Nausea, vomiting, delirium, seizures and loss of consciousness are additional common stroke-associated symptoms.

[0762] In contrast, most subarachnoid hemorrhage is caused by head trauma or aneurysm rupture which is accompanied by high pressure blood release which also causes direct cellular trauma. Prior to rupture, aneurysms may be asymptomatic, or occasionally associated with tension or migraine headaches. However, headache typically becomes acute and severe upon rupture, and may be accompanied by varying degrees of neurological deficit, vomiting, dizziness, and altered pulse and respiratory rates.

[0763] Transient ischemic attacks (TIAs) have a sudden onset and brief duration, typically 2-30 minutes. Most TIAs are due to emboli from atherosclerotic plaques, often originating in the arteries of the neck, and can result from brief interruptions of blood flow. The symptoms of TIAs are identical to those of stroke, but are only transient. Concomitant with underlying risk factors, patients experiencing TIAs are at a markedly increased risk for stroke.

[0764] Current diagnostic methods for stroke include costly and time-consuming procedures such as noncontrast computed tomography (CT) scan, electrocardiogram, magnetic resonance imaging (MRI), and angiography. Determining the immediate cause of stroke and differentiating ischemic from hemorrhagic stroke is difficult. CT scans can detect parenchymal bleeding greater than 1 cm and 95% of all subarachnoid hemorrhages. CT scan often cannot detect ischemic strokes until 6 hours from onset, depending on the infarct size. MRI may be more effective than CT scan in early detection of ischemic stroke, but it is less accurate at differentiating ischemic from hemorrhagic stroke, and is not widely available. An electrocardiogram (ECG) can be used in certain circumstances to identify a cardiac cause of stroke. Angiography is a definitive test to identify stenosis or occlusion of large and small cranial blood vessels, and can locate the cause of subarachnoid hemorrhages, define aneurysms, and detect cerebral vasospasm. It is, however, an invasive procedure that is also limited by cost and availability. Coagulation studies can also be used to rule out a coagulation disorder (coagulopathy) as a cause of hemorrhagic stroke.

[0765] Immediate diagnosis and care of a patient experiencing stroke can be critical. For example, tissue plasminogen activator (TPA) given within three hours of symptom onset in ischemic stroke is beneficial for selected acute stroke patients. Alternatively, patients may benefit from anticoagulants (e.g., heparin) if they are not candidates for TPA therapy. In contrast, thrombolytics and anticoagulants are strongly contraindicated in hemorrhagic strokes. Thus, early differentiation of ischemic events from hemorrhagic events is imperative. Moreover, delays in the confirmation of stroke diagnosis and the identification of stroke type limit the number of patients that may benefit from early intervention therapy. Finally, there are currently no diagnostic methods that can identify a TIA, or predict delayed neurological deficits which are often detected at a time after onset concurrent with the presentation of symptoms.

[0766] Accordingly, there is a present need in the art for a rapid, sensitive and specific diagnostic assay for stroke and TIA that can also differentiate the stroke type and identify those individuals at risk for delayed neurological deficits. Such a diagnostic assay would greatly increase the number of patients that can receive beneficial stroke treatment and therapy, and reduce the costs associated with incorrect stroke diagnosis.

[0767] The present invention relates to the identification and use of diagnostic markers for stroke and neural tissue injury. The methods and compositions described herein can meet the need in the art for rapid, sensitive and specific diagnostic assay to be used in the diagnosis and differentiation of various forms of stroke and TIAs. Moreover, the methods and compositions of the present invention can also be used to facilitate the treatment of stroke patients and the development of additional diagnostic and/or prognostic indicators.

[0768] In various aspects, the invention relates to materials and procedures for identifying markers that are associated with the diagnosis, prognosis, or differentiation of stroke and/or TIA in a patient; to using such markers in diagnosing and treating a patient and/or to monitor the course of a treatment regimen; to using such markers to identify subjects at risk for one or more adverse outcomes related to stroke and/or TIA; and for screening compounds and pharmaceutical compositions that might provide a benefit in treating or preventing such conditions.

[0769] In a first aspect, the invention discloses methods for determining a diagnosis or prognosis related to stroke, or for differentiating between types of strokes and/or TIA. These methods comprise analyzing a test sample obtained from a subject for the presence or amount of one or more markers for neural tissue injury. These methods can comprise identifying one or more markers, the presence or amount of which is associated with the diagnosis, prognosis, or differentiation of stroke and/or TIA. Once such marker(s) are identified, the level of such marker(s) in a sample obtained from a subject of interest can be measured. In certain embodiments, these markers can be compared to a level that is associated with the diagnosis, prognosis, or differentiation of stroke and/or TIA. By correlating the subject's marker level(s) to the diagnostic marker level(s), the presence or absence of stroke, the probability of future adverse outcomes, etc., in a patient may be rapidly and accurately determined.

[0770] In a related aspect, the invention discloses methods for determining the presence or absence of a disease in a subject that is exhibiting a perceptible change in one or more physical characteristics (that is, one or more “symptoms”) that are indicative of a plurality of possible etiologies underlying the observed symptom(s), one of which is stroke. These methods comprise analyzing a test sample obtained from the subject for the presence or amount of one or more markers selected to rule in or out stroke, or one or more types of stroke, as a possible etiology of the observed symptom(s). Etiologies other than stroke that are within the differential diagnosis of the symptom(s) observed are referred to herein as “stroke mimics”, and marker(s) able to differentiate one or more types of stroke from stroke mimics are referred to herein as “stroke differential diagnostic markers”. The presence or amount of such marker(s) in a sample obtained from the subject can be used to rule in or rule out one or more of the following: stroke, thrombotic stroke, embolic stroke, lacunar stroke, hypoperfusion, intracerebral hemorrhage, and subarachnoid hemorrhage, thereby either providing a diagnosis (rule-in) and/or excluding a diagnosis (rule-out).

[0771] Obtaining information on the true time of onset can be critical, as early treatments have been reported to be critical for proper treatment. Obtaining this time-of-onset information may be difficult, and is often based upon interviews with companions of the stroke victim. Thus, in various embodiments, markers and marker panels are selected to distinguish the approximate time since stroke onset. For purposes of the present invention, the term “acute stroke” refers to a stroke that has occurred within the prior 12 hours, more preferably within the prior 6 hours, and most preferably within the prior 3 hours; while the term “non-acute stroke” refers to a stroke that has occurred more than 12 hours ago, preferably between 12 and 48 hours ago, and most preferably between 12 and 24 hours ago. Preferred markers for differentiating between acute and non-acute strokes, referred to herein as stroke “time of onset markers” are described hereinafter.

[0772] For markers appearing in the patent which are already linked to stroke, either ischemic or hemorrhagic, variants could also help to diagnose, directly or by elimination of other conditions including but not limited to:
[0773] 1. Transient ischemic attack
[0774] 2. Brain trauma, in case it is unclear whether accompanied by stroke or not
[0775] 3. Migraine
[0776] 4. Bleeding in any part of the brain or inside the skull that cause or didn't cause damage to brain tissue
[0777] 5. Tumor
   In addition, such markers may help determine:
[0778] 1. The time of stroke
[0779] 2. The type of stroke
[0780] 3. The extent of tissue damage as a result of the stroke
[0781] 4. Response to immediate treatments that are meant to alleviate the extent of stroke and brain damage, when available.

[0782] With regard to stroke, according to preferred embodiments of the present invention, the panel may optionally and preferably provide diagnosis of stroke and indication if an ischemic stroke has occurred; diagnosis of stroke and indication if a hemorrhagic stroke has occurred; diagnosis of stroke, indication if an ischemic stroke has occurred, and indication if a hemorrhagic stroke has occurred; diagnosis of stroke and prognosis of a subsequent cerebral vasospasm; and diagnosis of stroke, indication if a hemorrhagic stroke has occurred, and prognosis of a subsequent cerebral vasospasm.

[0783] According to other optional embodiments of the present invention, there are provided methods of identifying a patient at risk for cerebral vasospasm. Such methods preferably comprise comparing an amount of one or more marker(s) predictive of a subsequent cerebral vasospasm in a test sample from a patient diagnosed with a subarachnoid hemorrhage. Such markers may be one or more markers related to blood pressure regulation, markers related to inflammation, markers related to apoptosis, and/or specific markers of neural tissue injury. As discussed herein, such marker may be used in panels comprising 2, 3, 4, 5, 6, 7, 8, 9, 10, 15, 20, or more or individual markers. Preferred marker(s) may be selected from the group consisting of IL-1ra, C-reactive protein (CRP) or variants thereof as described herein with regard to cluster HSCREACT, von Willebrand factor (vWF), vascular endothelial growth factor (VEGF) or variants thereof as described with regard to U.S. Pat. No. 6,783,954 (previously incorporated by reference), matrix metalloprotease-9 (MMP-9), neural cell adhesion molecule (NCAM) or variants thereof as described with regard to PCT Application No. WO 01/29215 (incorporated by reference as if fully set forth herein), BNP or variants thereof as described herein with regard to cluster HUMNATPEP, markers from cluster N56180, S67314, HUMCDDANF and/or HSACMHCP, and caspase-3, or markers related thereto. The levels of one or more markers may be compared to a predictive level of said marker(s), wherein said patient is identified as being at risk for cerebral vasospasm by a level of said marker(s) equal to or greater than said predictive level. In the alternative, a panel response value for a plurality of such markers may be determined, optionally considering a change in the level of one or more such markers as an additional independent marker.

[0784] According to yet other embodiments of the present invention, there are provided methods of differentiating ischemic stroke from hemorrhagic stroke using such marker panels.

### Cardiomyopathy and Myocarditis

[0785] Cardiomyopathy is a general diagnostic term designating primary myocardial disease which may progress to heart failure. Cardiomyopathies constitute a group of diseases in which the dominant feature is involvement of the heart muscle itself. In many cases, cardiomyopathies are of obscure or unknown aetiology, but in some cases the cause of the cardiomyopathy is known. For example, inflammatory cardiomyopathies may arise as a result of an infection by a viral, bacterial of parasitic organism. Cardiomyopathies may also result from a metabolic disorder such as a nutritional deficiency or by altered endocrine function. Other cardiomyopathies may be attributed to toxic substances, for example from alcohol or exposure to cobalt or lead. Still other types of cardiomyopathies may result from infiltration and deposition of abnormal cellular materials such as that known to occur during neoplastic infiltration or cardiac amyloidosis. Preferred marker(s) for diagnosis of cardiomyopathy and myocarditis, and related conditions as described herein, may optionally be selected from the group consisting of variants in N56180, S67314, HUMNATPEP, HUMCDDANF, HSACMHCP, HSCREACT or Z36249 clusters.

[0786] BNP levels have been shown to be elevated in specific cardiomyopathies. For example, BNP levels have been shown to be elevated in idiopathic dilated cardiomyopathy (Fruwald et al., 1999 Eur Heart J. 20: 1415-23), hypertrophic cardiomyopathy (Hamada et al., 1997 Clin Sci. (Colch) 94:21-8; Hasegawa et al., 1993 Circ. 88: 372-80), hypertrophic obstructive cardiomyopathy (Nishigaki et al., 1996 J. Am Coll Cardiol. 28:1234-42), dilated cardiomyopathy (Yasue et al., 1994 Circulation 90:195-203; Alterme et al., 1997 J. Heart Lung Transplant 16:765-73), genetic cardiomyopathy (Carnio et al., 1997 Regul Pept. 70:67-73) and in cardiac amyloidosis. However, none of these references disclose that BNP or ANF levels are elevated in other causes of cardiomyopathy including inflammatory cardiomyopathy that arise following or as a result of an infection.

[0787] Myocarditis is a condition relating to inflammation of the heart muscle. More specifically myocarditis is a disorder caused by inflammation of the myocytes, interstitium, vascular elements or the pericardium of the heart. Much like the cardiomyopathies, the causative agent of myocarditis may be known or unknown. However, it is known that myocarditis may arise as a complication during or after infection by various viral, bacterial or parasitic disease organisms. In North America, viruses (especially enteroviruses) are presumed to be the most common agents of myocarditis, whereas in South America, Chagas disease (American trypanosomia) produced by Trypanosoma cruzi is far more common. Patients with myocarditis may exhibit several symptoms including fever, and heart function problems, for example lower cardiac output. Myocarditis can also result from an inflammation without infection, due to an auto-immune process for example.

[0788] A number of infections and infectious agents are associated with cardiomyopathy and/or myocarditis. By the term infection it is meant any viral infection, rickettsial infection, bacterial infection, mycobacterial infection, spirochetal infection, fungal infection, parasitic infection or any other infection by any other infectious organism known in the art. The infection may directly cause cardiomyopathy or myocardits, or the infection may indirectly contribute to the development of cardiomyopathy or myocarditis.

[0789] N56180 variants, S67314 variants, HUMNATPEP variants, HUMCDDANF variants, HSACMHCP variants, HSCREACT variants and/or Z3624 variants are potential markers for cardiomyopathy and/or myocarditis.

### Congestive Heart Failure (CHF)

[0790] N56180 variants, S67314 variants, HUMNATPEP variants, HUMCDDANF variants, HSACMHCP variants, HSCREACT variants, HSTGFB1 variants and/or Z3624 variants are potential markers for CHF. Other conditions that may be diagnosed by these markers or variants of them include but are not limited to the presence, risk and/or extent of the following:
[0791] 1. A risk factor for sudden cardiac death, from arrhythmia or any other heart related reason.
[0792] 2. Rejection of a transplanted heart.
[0793] 3. Conditions that lead to heart failure including but not limited to myocardial infarction, angina, arrhythmias, valvular diseases, atrial and/or ventricular septal defects.
[0794] 4. Conditions that cause atrial and or ventricular wall volume overload. Wall stretch results in enhanced secretion of cardiac extracellular regulators. Such conditions include but are not limited to systemic arterial hypertension, pulmonary hypertension and pulmonary embolism.
[0795] 5. Conditions which have similar clinical symptoms as heart failure and as states that cause atrial and or ventricular pressure-overload, where the differential diagnosis between these conditions to the latter is of clinical importance including but not limited to breathing difficulty and/or hypoxia due to pulmonary disease, anemia or anxiety.

### Cancerous Conditions

[0796] Various non-limiting examples are given below of cancerous conditions for which one or more variants according to the present invention may have a diagnostic utility.

### Breast Cancer

[0797] S57296, HUMGRP5E, T94936, and/or HSTGFB1 or variants as described herein or markers related thereto are potential markers for breast cancer. Other conditions that may be diagnosed by these markers or variants of them include but are not limited to the presence, risk and/or extent of the following:
[0798] 1. The identification of a metastasis of unknown origin which originated from a primary breast cancer tumor.
[0799] 2. In the assessment of lymphadenopathy, and in particular axillary lymphadenopathy.
[0800] 3. Distinguishing between different types of breast cancer, therefore potentially affect treatment choice (e.g. as HER-2)
[0801] 4. Differential diagnosis between a benign and malignant breast mass.
[0802] 5. As a tool in the assessment of conditions affecting breast skin (e.g. Paget's disease) and their differentiation from breast cancer.
[0803] 6. Differential diagnosis of breast pain or discomfort resulting from either breast cancer or other possible conditions (e.g. mastitis, Mondors syndrome).
[0804] 7. Other conditions not mentioned above which have similar symptoms, signs and complications as breast cancer and where the differential diagnosis between them and breast cancer is of clinical importance including but not limited to:
   [0805] a. Abnormal mammogram and/or nipple retraction and/or nipple discharge due to causes other than breast cancer. Such causes include but are not limited to benign breast masses, melanoma, trauma and technical and/or anatomical variations.
   [0806] b. Any condition suggestive of a malignant tumor including but not limited to anorexia, cachexia, weight loss, fever, hypercalcemia, paraneoplastic syndrome.
   [0807] c. Lymphadenopathy, weight loss and other signs and symptoms associated with breast cancer but originate from diseases different from breast cancer including but not limited to other malignancies, infections and autoimmune diseases.

### Ovarian Cancer

[0808] S57296, HUMGRP5E, T94936, M78530 and/or HSTGFB1 or variants as described herein or markers related thereto are potential markers for ovarian cancer. Other conditions that may be diagnosed by these markers or variants of them include but are not limited to the presence, risk and/or extent of the following:
[0809] 1. The identification of a metastasis of unknown origin which originated from a primary ovarian cancer, for example gastric carcinoma (such as Krukenberg tumor), breast cancer, colorectal carcinoma and pancreatic carcinoma.
[0810] 2. Distinguishing between different types of ovarian cancer, therefore potentially affect treatment choice (e.g. discrimination between epithelial tumors and germ cell tumors).
[0811] 3. Differential diagnosis between a benign and malignant ovarian cysts.
[0812] 4. Infertility, particularly differential diagnosis of various causes thereof.
[0813] 5. Other conditions that may elevate serum levels of ovary related markers. These include but are not limited to: cancers of the endometrium, cervix, fallopian tubes, pancreas, breast, lung and colon; nonmalignant conditions such as pregnancy, endometriosis, pelvic inflammatory disease and uterine fibroids.
[0814] 6. Conditions which have similar symptoms, signs and complications as ovarian cancer and where the differential diagnosis between them and ovarian cancer is of clinical importance including but not limited to:
   [0815] a. Non-malignant causes of pelvic mass. Including, but not limited to: benign (functional) ovarian cyst, uterine fibroids, endometriosis, benign ovarian neoplasms and inflammatory bowel lesions
   [0816] b. Any condition suggestive of a malignant tumor including but not limited to anorexia, cachexia, weight loss, fever, hypercalcemia, skeletal or abdominal pain, paraneoplastic syndrome.
   [0817] c. Ascites.

### Lung Cancer

[0818] S57296, HUMGRP5E, T94936, and/or HSTGFB1 or variants as described herein or markers related thereto are potential markers for lung cancer. Other conditions that may be diagnosed by these markers or variants of them include but are not limited to the presence, risk and/or extent of the following:
[0819] 1. The identification of a metastasis of unknown origin which originated from a primary lung cancer.
[0820] 2. The assessment of a malignant tissue residing in the lung that is from a non-lung origin, including but not limited to: osteogenic and soft tissue sarcomas; colorectal, uterine, cervix and corpus tumors; head and neck, breast, testis and salivary gland cancers; melanoma; and bladder and kidney tumors.
[0821] 3. Distinguishing between different types of lung cancer, therefore potentially affect treatment choice (e.g. small cell vs. non small cell tumors).
[0822] 4. Unexplained dyspnea and/or chronic cough and/or hemoptysis, and analysis thereof.
[0823] 5. Differential diagnosis of the origin of a pleural effusion.
[0824] 6. Conditions which have similar symptoms, signs and complications as lung cancer and where the differential diagnosis between them and lung cancer is of clinical importance including but not limited to:
   [0825] a. Non-malignant causes of lung symptoms and signs. Symptoms and signs include, but are not limited to: lung lesions and infiltrates, wheeze, stridor.
   [0826] b. Other symptoms, signs and complications suggestive of lung cancer, such as tracheal obstruction, esophageal compression, dysphagia, recurrent laryngeal nerve paralysis, hoarseness, phrenic nerve paralysis with elevation of the hemidiaphragm and Horner syndrome.
   [0827] c. Any condition suggestive of a malignant tumor including but not limited to anorexia, cachexia, weight loss, fever, hypercalcemia, hypophosphatemia, hyponatremia, syndrome of inappropriate secretion of antidiuretic hormone, elevated ANP, elevated ACTH, hypokalemia, clubbing, neurologic-myopathic syndromes and thrombophlebitis.

### Colorectal Cancer:

[0828] Certain splice variants described herein are potential markers for colon cancer. Colon cancer markers according to the present invention which may also optionally have this utility include but are not limited to: S57296, HUMGRP5E, T94936, and/or HSTGFB1 or variants as described herein or markers related thereto. Diagnosis of colon cancer and or of other conditions that may be diagnosed by these markers or variants of them include but are not limited to the presence, risk and/or extent of the following:
[0829] 1. Early diagnosis, staging, grading, prognosis, monitoring, and treatment of diseases associated with colon cancer, or to indicate a predisposition to such for preventative measures.
[0830] 2. The identification of a metastasis of unknown origin which originated from a primary colorectal cancer tumor, in particular when the metastasis is located in the liver, lung, bones, supraclavicluar lymph nodes or brain.
[0831] 3. In the assessment of lymphadenopathy, in particular supraclavicluar or internal abdominal lymphadenopathy.
[0832] 4. As a marker to distinguish between different types of colorectal tumors including but not limited to nonhereditary carcinoma, Familial Polyposis Coli, Hereditary nonpolyposis colon cancer (Lynch syndrome) and Carcinoid; therefore potentially affect treatment choice.
[0833] 5. In the assessment of cancer staging, in addition and as a complementary measure to the Dukes system for staging colorectal cancer.
[0834] 6. As a risk factor to the development of colorectal tumor, and in particular in diseases known to have high incidence of colorectal tumor, including but not limited to Crohn's disease and Ulcerative Colitis.
[0835] 7. As a tool in the assessment of fecal occult blood or imaging findings suspected for colorectal tumor or abnormal blood tests associated with colorectal cancer including but not limited to elevated CEA level.
[0836] 8. In the differential diagnosis between malignant and benign colorectal tumors, in particular adenomas and polyps.
[0837] 9. Other conditions not mentioned above which have similar symptoms, signs and complications as colorectal cancer and where the differential diagnosis between them and colorectal cancer is of clinical importance including but not limited to:
   [0838] a. Any condition suggestive of a malignant tumor including but not limited to anorexia, cachexia, weight loss, fever, hypercalcemia, paraneoplastic syndrome.
   [0839] b. Lymphadenopathy, weight loss and other signs and symptoms associated with colorectal cancer but originate from diseases different from colorectal cancer including but not limited to other malignancies, infections and autoimmune diseases.
[0840] 10. Prediction of patient's drug response
[0841] 11. As surrogate markers for clinical outcome of a treated cancer.

### Related Disease Markers and Risk Factors for Detection by Biomarkers

[0842] In addition to the general clinical factors described above, as well as specific diagnostic aspects of each biomarker described below, there are field-specific disease markers/risk factors which may optionally relate to or present diagnostic applications for biomarkers according to the present invention. These field specific factors, as described below, relate to three fields: detection of ovarian cancer (or risk factors thereof), detection of myocardial infarction (or risk factors thereof) and risk factors related to cholesterol which may also serve as diagnostic markers. Each field is described in greater detail below.

### Ovarian Cancer

[0843] Known ovarian cancer markers may be used for a variety of diagnoses and/or detection of risk factors, in addition to those related to ovarian cancer itself. These known markers include but are not limited to CA 125. CA 125 may optionally be used for a number of diagnostic assays, such as detection of sepsis (and/or similar bacterial infections) and/or monitoring of the course of infection (as described with regard to PCT Application No. WO 03/048776, hereby incorporated by reference as if fully set forth herein) for example.

[0844] Ovarian cancer markers according to the present invention which may also optionally have this utility include but are not limited to: M78530 variants, HUMGRP5E variants, S57296 variants, T94936 variants, and/or HSTGFB1 variants.

### Myocardial Infarction

[0845] Known markers for myocardial infarction and/or risk factors thereto may be used for a variety of diagnoses and/or detection of risk factors, in addition to those related to myocardial infarction itself. These known markers include but are not limited to troponin I. Troponin I may optionally be used for determining the time at which a myocardial infarction occurred, as described with regard to U.S. Pat. No. 5,947,124, hereby incorporated by reference as if fully set forth herein. The method optionally and preferably involves measuring the ratio of oxidized to reduced troponin I in a blood sample obtained from the patient. The measured ratio reflects the time elapsed from the time of the myocardial infarction.

[0846] Another optional utility involves diagnosing the presence of congestive heart failure and preferably predicting mortality of a subject suffering from congestive heart failure, by detecting troponin I in a sample taken from the subject (as described with regard to US Patent Application No. 2004/0096989, hereby incorporated by reference as if fully set forth herein).

[0847] Markers according to the present invention which may also optionally have these utilities include but are not limited to: N56180 variants, S67314 variants, HUMNATPEP variants, HUMCDDANF variants, HSACMHCP variants, HSCREACT variants and/or Z3624 variants.

### Cholesterol

[0848] Abnormal cholesterol profile is a known risk factor for a number of diseases and conditions, including but not limited to cardiac diseases (both acute and chronic), atherosclerosis in general, stroke, metabolic syndrome and Alzheimer's disease (for a description of the relationship between high cholesterol levels and Alzheimer's disease, see for example Yanagisawa, Subcell Biochem. 2005; 38:179-202). Abnormal cholesterol profiles can also combine with other diseases and conditions as risk factors for yet other diseases and conditions. One example of such a combination is the association of high cholesterol levels and metabolic syndrome with increased risk for stroke (see for example Brown, Clin Cornerstone. 2004; 6 Suppl 3:S30-4).

[0849] Cardiac diseases that are affected by an abnormal cholesterol profile include all of the cardiovascular diseases described previously, plus arterial stiffness, atherosclerosis and peripheral vascular disease. In addition to diagnosis of such diseases or a tendency thereto, abnormal cholesterol profiles may optionally be used to detect a tendency toward other diseases for which arterial stiffness, atherosclerosis and peripheral vascular disease are early warning signs, including but not limited to stroke and circulation-related peripheral tissue damage, such as skin ulcers for example. The latter are quite frequent in diabetics and can result in significant damage, including loss of limbs through amputation.

[0850] PCT Application No. WO 02/062300, hereby incorporated by reference as if fully set forth herein, describes the link between cholesterol levels and a number of cognitive or psychological disorders, including but not limited to, age-related memory loss, mild cognitive impairment, dementia, substance abuse disorders (including but not limited to disorders characterized by an abuse of or dependence on a substance selected from the group consisting of alcohol, stimulants, opiates, marijuana, solvents, and nicotine), depression, dysthymia, cyclothymia, bipolar disorder, schizoaffective disorder, and borderline personality disorder.

[0851] Markers according to the present invention which may also optionally have these utilities include but are not limited to: N56180 variants, S67314 variants, HUMNATPEP variants, HUMCDDANF variants, HSACMHCP variants, HSCREACT variants and/or Z3624 variants.

### Candidate Marker Examples Section

[0852] This section relates to examples of sequences according to the present invention, including illustrative methods of selection thereof.

[0853] The markers of the present invention were tested with regard to their expression in various cancerous and non-cancerous tissue samples. A description of the samples used in the prostate cancer testing panel is provided in Table 2 below. A description of the samples used in the ovarian cancer testing panel is provided in Table 3 below. A description of the samples used in the colon cancer testing panel is provided in Table 4 below. A description of the samples used in the lung cancer testing panel is provided in Table 5 below. A description of the samples used in the breast cancer testing panel is provided in Table 6 below. A description of the samples used in the normal tissue panel, used also for the testing of the markers of the present invention with regard to their expression in various heart and non-heart tissue samples, is provided in Table 7 below. Tests were then performed as described in the “Materials and Experimental Procedures” section below.

TABLE 2
Tissue samples in prostate cancer testing panel

| | Lot No. | Pathology | Sex/Age | Source |
|---|---|---|---|---|
| 66-A-Adeno G1 GS-4 | 160202 | Adenocarcinoma Gleason score 4 | M/64 | ABS |
| 73-A-Adeno G1 GS-4 | 16026T2 | Acinar Adenocarcinoma | M/77 | ABS |
| | | Gleason score 4 (2 + 2) | | |
| 68-A-Adeno G1 GS-5 | 160172 | Adenocarcinoma Gleason score 5 | M/66 | ABS |
| 56-Am-Adeno G1 GS-5 | 36467 | Adenocarcinoma, Gleason | M/72 | Ambion |
| | | score 5 (3 + 2); stage 2 | | |
| 58-Am-Adeno G1 GS-5 | 37192 | Adenocarcinoma, Gleason | M/52 | Ambion |
| | | score 5; stage 2 | | |
| 65-A-Adeno G2 GS-5 | 160022 | Adenocarcinoma Gleason score 5 | M/66 | ABS |
| 69-A-Adeno GS-5 | 160182 | Acinar Adenocarcinoma | M/58 | ABS |
| | | Gleason score 5 | | |
| 55-Am-Adeno GS-5 | 36464 | Adenocarcinoma, Gleason | M/53 | Ambion |
| | | score 5; stage 1 | | |
| 64-A-Adeno G2 GS-6 | 160092 | Acinar Adenocarcinoma | M/71 | ABS |
| | | Gleason score 6 | | |
| 70-A-Adeno G2 GS-6 | 160192 | Adenocarcinoma Gleason score 6 | M/53 | ABS |
| 18-A-Adeno GS-6 | 5610020069T | Adenocarcinoma, Gleason | M | ABS |
| | | score 6 (3 + 3) | | |
| 67-A-Adeno GS-6 | 160142 | Acinar Adenocarcinoma | M/62 | ABS |
| | | Gleason score 6 | | |
| 25-A-Adeno GS-7 | 5605020052T | Adenocarcinoma, Gleason | M | ABS |
| | | score 7 (4 + 3) | | |
| 26-A-Adeno GS-7 | 5609020067T | Adenocarcinoma, Gleason | M | ABS |
| | | score 7 (4 + 3) | | |
| 72-A-Adeno GS-7 | 160122 | Acinar Adenocarcinoma | M/66 | ABS |
| | | Gleason score 7 | | |
| 71-A-Adeno GS-7 | 160242 | Acinar Adenocarcinoma | M/70 | ABS |
| | | Gleason score 7 | | |
| 57-Am-Adeno GS-7 | 26442 | Adenocarcinoma, Gleason | M/62 | Ambion |
| | | score 7 | | |
| 32-A-Adeno GS-9 | 5604020042T | Adenocarcinoma, Gleason | M | ABS |
| | | score 9 (5 + 4) | | |
| 54-B-Adeno G3 | A610031 | Adenocarcinoma | | Biochain |
| 33-A-BPH | 5607020058 | BPH | M | ABS |
| 34-A-BPH | 5607020059 | BPH | M | ABS |
| 35-A-BPH | 5607020060 | BPH | M | ABS |
| 43-B-PBH | A609267 | BPH | M/66 | Biochain |
| 44-B-PBH | A609268 | BPH | M/72 | Biochain |
| 45-B-PBH | A609269 | BPH | M/69 | Biochain |
| 46-B-PBH | A609270 | BPH | M/65 | Biochain |
| 47-B-PBH | A609271 | BPH | M/71 | Biochain |
| 40-A-N M26 | 5609020067N | Normal Matched | M | ABS |
| 41-A-N M32 | 5604020042N | Normal Matched | M | ABS |
| 48-B-N | A609257 | Normal PM | M/24 | Biochain |
| 49-B-N | A609256 | Normal PM | M/36 | Biochain |
| 50-B-N | A609255 | Normal PM | M/26 | Biochain |
| 51-B-N | A609258 | Normal PM | M/27 | Biochain |
| 52-B-N | A609254 | Normal PM | M/29 | Biochain |
| 53-Cl-N | 1070317 | Normal - Pool of 47 | M&F | Clontech |
| 42-Am-N | 061P04A | Normal (IC BLEED) | M/47 | ambion |
| 59-Am-N | 25955 | Normal PM (Head trauma) | M/62 | Ambion |
| 60-Am-N | 33605 | Normal PM (Myocardial | M/69 | Ambion |
| | | infraction) | | |
| 61-Am-N | 34077 | Normal PM (Alzheimer's) | M/71 | Ambion |
| 62-Am-N | 31316 | Normal (Renal failure) | M/79 | Ambion |
| 63-Am-N | 30991 | Normal (Gall Bladder cancer) | M/78 | Ambion |

TABLE 3
Tissue samples in ovarian cancer testing panel

| Sample name | Lot number | Source | Pathology | Grade | Age |
|---|---|---|---|---|---|
| 33-B-Pap Sero CystAde G1 | A503175 | BioChain | Serous papillary | 1 | 41 |
| | | | cystadenocarcinoma | | |
| 41-G-Mix Sero/Muc/Endo G2 | 98-03-G803 | GOG | Mixed epithelial | 2 | 38 |
| | | | cystadenocarcinoma with | | |
| | | | mucinous, endometrioid, | | |
| | | | squamous and papillary serous | | |
| | | | (Stage 2) | | |
| 35-G-Endo Adeno G2 | 94-08-7604 | GOG | Endometrioid adenocarcinoma | 2 | 39 |
| 14-B-Adeno G2 | A501111 | BioChain | Adenocarcinoma | 2 | 41 |
| 12-B-Adeno G3 | A406023 | Biochain | Adenocarcinoma | 3 | 45 |
| 40-G-Mix Sero/Endo G2 | 95-11-G006 | GOG | Papillary serous and endometrioid | 2 | 49 |
| | | | cystadenocarcinoma (Stage 3C) | | |
| 4-A-Pap CystAdeno G2 | ILS-7286 | ABS | Papillary cystadenocarcinoma | 2 | 50 |
| 3-A-Pap Adeno G2 | ILS-1431 | ABS | Papillary adenocarcinoma | 2 | 52 |
| 2-A-Pap Adeno G2 | ILS-1408 | ABS | Papillary adenocarcinoma | 2 | 53 |
| 5-G-Adeno G3 | 99-12-G432 | GOG | Adenocarcinoma (Stage 3C) | 3 | 46 |
| 11-B-Adeno G3 | A407068 | Biochain | Adenocarcinoma | 3 | 49 |
| 39--G-Mix Sero/Endo G3 | 2001-12-G037 | GOG | Mixed serous and endometrioid | 3 | 49 |
| | | | adenocarcinoma | | |
| 29-G-Sero Adeno G3 | 2001-12-G035 | GOG | Serous adenocarcinoma (Stage 3A) | 3 | 50 |
| 70-G-Pap Sero Adeno G3 | 95-08-G069 | GOG | Papillary serous adenocarcinoma | 3 | 50 |
| 6-A-Adeno G3 | A0106 | ABS | adenocarcinoma | 3 | 51 |
| 31-B-Pap Sero CystAde G3 | A503176 | BioChain | Serous papillary | 3 | 52 |
| | | | cystadenocarcinoma | | |
| 25-A-Pap Sero Adeno G3 | N0021 | ABS | Papillary serous adenocarcinoma | 3 | 55 |
| | | | (Stage T3CN1MX) | | |
| 37-G-Mix Sero/Endo G3 | 2002-05-G513 | GOG | Mixed serous and endometrioid | 3 | 56 |
| | | | adenocarcinoma | | |
| 7-A-Adeno G3 | IND-00375 | ABS | adenocarcinoma | 3 | 59 |
| 8-B-Adeno G3 | A501113 | BioChain | adenocarcinoma | 3 | 60 |
| 10-B-Adeno G3 | A407069 | Biochain | Adenocarcinoma | 3 | 60 |
| 38-G-Mix Sero/Endo G3 | 2002-05-G509 | GOG | Mixed serous and endometrioid | 3 | 64 |
| | | | adenocarcinoma of mullerian | | |
| | | | (Stage 3C) | | |
| 13-G-Adeno G3 | 94-05-7603 | GOG | Poorly differentiated | 3 | 67 |
| | | | adenocarcinoma from primary | | |
| | | | peritoneal | | |
| 24-G-Pap Sero Adeno G3 | 2001-07-G801 | GOG | Papillary serous adenocarcinoma | 3 | 68 |
| 34-G-Pap Endo Adeno G3 | 95-04-2002 | GOG | Papillary endometrioid | 3 | 68 |
| | | | adenocarcinoma (Stage 3C) | | |
| 30-G-Pap Sero Adeno G3 | 2001-08-G011 | GOG | Papillary serous carcinoma | 3 | 72 |
| | | | (Stage 1C) | | |
| 1-A-Pap Adeno G3 | ILS-1406 | ABS | Papillary adenocarcinoma | 3 | 73 |
| 9-G-Adeno G3 | 99-06-G901 | GOG | Adenocarcinoma (maybe serous) | 3 | 84 |
| 32-G-Pap Sero CystAde G3 | 93-09-4901 | GOG | Serous papillary | 3 | 67 |
| | | | cystadenocarcinoma | | |
| 66-G-Pap Sero Adeno G3 SIV | 2000-01-G413 | GOG | Papillary serous carcinoma | 3 | 67 |
| | | | (metastais of primary peritoneum) | | |
| | | | (Stage 4) | | |
| 19-B-Muc Adeno G3 | A504085 | BioChain | Mucinous adenocarcinoma | 3 | 34 |
| 21-G-Muc CystAde G2-3 | 95-10-G020 | GOG | Mucinous cystadenocarcinoma | 2-3 | 44 |
| | | | (Stage 2) | | |
| 18-B-Muc Adeno G3 | A504083 | BioChain | Mucinous adenocarcinoma | 3 | 45 |
| 20-A-Pap Muc CystAde | USA-00273 | ABS | Papillary mucinous | | 46 |
| | | | cystadenocarcinoma | | |
| 17-B-Muc Adeno G3 | A504084 | BioChain | Mucinous adenocarcinoma | 3 | 51 |
| 22-A-Muc CystAde G2 | A0139 | ABS | Mucinous cystadenocarcinoma | 2 | 72 |
| | | | (Stage 1C) | | |
| 43-G-Clear cell Adeno G3 | 2001-10-G002 | GOG | Clear cell adenocarcinoma | 3 | 74 |
| 44-G-Clear cell Adeno | 2001-07-G084 | GOG | Clear cell adenocarcinoma | | 73 |
| | | | (Stage 3A) | | |
| 15-B-Adeno G3 | A407065 | BioChain | Carcinoma | 3 | 27 |
| 16-Ct-Adeno | 1090387 | Clontech | Carcinoma NOS | NA | 58 |
| 23-A-Muc CystAde G3 | VNM-00187 | ABS | Mucinous cystadenocarcinoma | 3 | 45 |
| | | | with low malignant | | |
| 42-G-Adeno borderline | 98-08-G001 | GOG | Epithelial adenocarcinoma of | | 46 |
| | | | borderline malignancy | | |
| 63-G-Sero CysAdenoFibroma | 2000-10-G620 | GOG | Serous CysAdenoFibroma of | | 71 |
| | | | borderline malignancy | | |
| 62-G-Ben Muc CysAdenoma | 99-10-G442 | GOG | Benbin mucinus cysadenoma | | 32 |
| 60-G-Muc CysAdenoma | 99-01-G043 | GOG | Mucinous Cysadenoma | | 40 |
| 56-G-Ben Muc CysAdeno | 99-01-G407 | GOG | Bengin mucinus cysadenoma | | 46 |
| 64-G-Ben Sero CysAdenoma | 99-06-G039 | GOG | Bengin Serous CysAdenoma | | 57 |
| 61-G-Muc CysAdenoma | 99-07-G011 | GOG | Mucinous Cysadenoma | | 63 |
| 59-G-Sero CysAdenoFibroma | 98-12-G401 | GOG | Serous CysAdenoFibroma | | 77 |
| 51-G-N M41 | 98-03-G803N | GOG | Normal (matched tumor 98-03- | | 38 |
| | | | G803) | | |
| 75-G-N M60 | 99-01-G043N | GOG | Normal (matched tumor 99-01- | | 40 |
| | | | G043) | | |
| 49-B-N M14 | A501112 | BioChain | Normal (matched tumor | | 41 |
| | | | A501111) | | |
| 52-G-N M42 | 98-08-G001N | GOG | Normal (matched tumor 98-08- | | 46 |
| | | | G001) | | |
| 68-G-N M56 | 99-01-G407N | GOG | Normal (matched bengin 99-01- | | 46 |
| | | | G407) | | |
| 50-B-N M8 | A501114 | BioChain | Normal (matched tumor | | 60 |
| | | | A501113) | | |
| 67-G-N M38 | 2002-05-509N | GOG | Normal (matched tumor 2002-05- | | 64 |
| | | | G509) | | |
| 69-G-N M24 | 2001-07-G801N | GOG | Normal (matched tumor 2001-07- | | 68 |
| | | | G801) | | |
| 73-G-N M59 | 98-12-G401N | GOG | Normal (matched tumor 98-12- | | 77 |
| | | | G401) | | |
| 72-G-N M66 | 2000-01-G413N | GOG | Normal (matched tumor 2000-01- | | |
| | | | G413) | | |
| 45-B-N | A503274 | BioChain | Normal PM | | 41 |
| 46-B-N | A504086 | BioChain | Normal PM | | 41 |
| 71-CG-N | CG-188-7 | Ichilov | Normal PM | | 49 |
| 48-B-N | A504087 | BioChain | Normal PM | | 51 |

TABLE 4
Tissue samples in colon cancer testing panel

| COLON PANEL | | | | | | gender/ |
|---|---|---|---|---|---|---|
| sample name | Lot No. | tissue | source | pathology | Grade | age |
| 58-B-Adeno G1 | A609152 | Colon | biochain | Adenocarcinoma | 1 | M/73 |
| 59-B-Adeno G1 | A609059 | Colon | biochain | Adenocarcinoma, Ulcer | 1 | M/58 |
| 14-CG-Polypoid Adeno | CG-222 (2) | Rectum | Ichilov | Well polypoid adeocarcinoma Duke's C | | F/49 |
| G1 D-C | | | | | | |
| 17-CG-Adeno G1-2 | CG-163 | Rectum | Ichilov | Adenocarcinoma | 2 | M/73 |
| 10-CG-Adeno G1-2 D-B2 | CG-311 | Sigmod co | Ichilov | Adenocarcinoma Astler-Coller B2. | 1-2 | M/88 |
| 11-CG-Adeno G1-2 D-C2 | CG-337 | Colon | Ichilov | Adenocarcinoma Astler-Coller C2. | 1-2 | NA |
| 6-CG-Adeno G1-2 D-C2 | CG-303 (3) | Colon | Ichilov | Adenocarcinoma Astler-Coller C2. | 1-2 | F/77 |
| 5-CG-Adeno G2 | CG-308 | Colon Sign | Ichilov | Adenocarcinoma. | 2 | F/80 |
| 16-CG-Adeno G2 | CG-278C | colon | Ichilov | Adenocarcinoma | 2 | F/60 |
| 56-B-Adeno G2 | A609148 | Colon | biochain | Adenocarcinoma | 2 | F48 |
| 61-B-Adeno G2 | A606258 | Colon | biochain | Adenocarcinoma, Ulcer | 2 | M/41 |
| 60-B-Adeno G2 | A609058 | Colon | biochain | Adenocarcinoma, Ulcer | 2 | M/67 |
| 22-CG-Adeno G2 D-B | CG-229C | Colon | Ichilov | Adenocarcinoma Duke's B | 2 | F/55 |
| 1-CG-Adeno G2 D-B2 | CG-335 | Cecum | Ichilov | Adenocarcinoma Dukes B2. | 2 | F/66 |
| 12-CG-Adeno G2 D-B2 | CG-340 | Colon Sign | Ichilov | Adenocarcinoma Astler-Coller B2. | 2 | M/66 |
| 28-CG-Adeno G2 D-B2 | CG-284 | sigma | Ichilov | Adenocarcinoma Duke's B2 | 2 | F/72 |
| 2-CG-Adeno G2 D-C2 | CG-307 X2 | Cecum | Ichilov | Adenocarcinoma Astler-Coller C2. | 2 | F/89 |
| 9-CG-Adeno G2 D-D | CG-297 X2 | Rectum | Ichilov | Adenocarcinoma Dukes D. | 2 | M/62 |
| 13-CG-Adeno G2 D-D | CG-290 X2 | Rectosigm | Ichilov | Adenocarcinoma Dukes D. | 2 | M/47 |
| 26-CG-Adeno G2 D-D | CG-283 | sigma | Ichilov | Colonic adenocarcinoma Duke's D | 2 | F/63 |
| 4-CG-Adeno G3 | CG-276 | Colon | Ichilov | Carcinoma. | 3 | M/64 |
| 53-B-Adeno G3 | A609161 | Colon | biochain | Adenocarcinoma | 3 | F/53 |
| 54-B-Adeno G3 | A609142 | Colon | biochain | Adenocarcinoma | 3 | M/53 |
| 55-B-Adeno G3 | A609144 | Colon | biochain | Adenocarcinoma | 3 | M/68 |
| 57-B-Adeno G3 | A609150 | Colon | biochain | Adenocarcinoma | 3 | F/45 |
| 72-CG-Adeno G3 | CG-309 | colon | Ichilov | Adenocarcinoma | 3 | F/88 |
| 20-CG-Adeno G3 D-B2 | CG-249 | Colon | Ichilov | Ulcerated adenocarcinoma Duke's B2 | 3 | M/36 |
| 7-CG-Adeno D-A | CG-235 | Rectum | Ichilov | Adenocarcinoma intramucosal Duke's A. | | F/66 |
| 23-CG-Adeno D-C | CG-282 | sigma | Ichilov | Mucinus adenocarcinoma Astler Coller C | | M/51 |
| 3-CG-Muc adeno D-D | CG-224 | Colon | Ichilov | Mucinois adenocarcinoma Duke's D | | M/48 |
| 18-CG-Adeno | CG-22C | Colon | Ichilov | Adenocarcinoma | | NA |
| 19-CG-Adeno | CG-19C (1) | Colon | Ichilov | Adenocarcinoma | | NA |
| 21-CG-Adeno | CG-18C | Colon | Ichilov | Adenocarcinoma | | NA |
| 24-CG-Adeno | CG-12 (2) | Colon | Ichilov | Adenocarcinoma | | NA |
| 25-CG-Adeno | CG-2 | Colon | Ichilov | Adenocarcinoma | | NA |
| 27-CG-Adeno | CG-4 | Colon | Ichilov | Adenocarcinoma | | NA |
| 8-CG-diverticolosis, | CG-291 | Wall of sig [symbol] | Ichilov | Diverticolosis and diverticulitis of the Colon | | F/65 |
| diverticulitis | | | | | | |
| 46-CG-Crohn's disease | CG-338C | Cecum | Ichilov | Crohn's disease | | M/22 |
| 47-CG-Crohn's disease | CG-338AC | Colon | Ichilov | Crohn's disease. | | M/22 |
| 42-CG-N M20 | CG-249N | Colon | Ichilov | Normal | | M/36 |
| 43-CG-N M8 | CG-291N | Wall of sig [symbol] | Ichilov | Normal | | F/65 |
| 44-CG-N M21 | CG-18N | Colon | Ichilov | Normal | | NA |
| 45-CG-N M11 | CG-337N | Colon | Ichilov | Normal | | M/75 |
| 49-CG-N M14 | CG-222N | Rectum | Ichilov | Normal | | F/49 |
| 50-CG-N M5 | CG-308N | Sigma | Ichilov | Within normal limits | | F/80 |
| 51-CG-N M26 | CG-283N | Sigma | Ichilov | Normal | | F/63 |
| 41-B-N | A501156 | Colon | biochain | Normal PM | | M/78 |
| 52-CG-N | CG-309TR | Colon | Ichilov | Within normal limits | | F/88 |
| 62-B-N | A608273 | Colon | biochain | Normal PM | | M/66 |
| 63-B-N | A609260 | Colon | biochain | Normal PM | | M/61 |
| 64-B-N | A609261 | Colon | biochain | Normal PM | | F/68 |
| 65-B-N | A607115 | Colon | biochain | Normal PM | | M/24 |
| 66-B-N | A609262 | Colon | biochain | Normal PM | | M/58 |
| 67-B-N | A406029 | Colon | biochain | Normal PM (Pool of 10) | | |
| 69-B-N | A411078 | Colon | biochain | Normal PM (Pool of 10) | | F&M |
| 70-Cl-N | 1110101 | Colon | clontech | Normal PM (Pool of 3) | | |
| 71-Am-N | 071P10B | Colon | Ambion | Normal (IC BLEED) | | F/34 |

[symbol]

indicates data missing or illegible when filed

TABLE 5
Tissue samples in lung cancer testing panel

| sample rename | Lot No. | source | pathology | Grade | gender/age |
|---|---|---|---|---|---|
| 1-B-Adeno G1 | A504117 | Biochain | Adenocarcinoma | 1 | F/29 |
| 2-B-Adeno G1 | A504118 | Biochain | Adenocarcinoma | 1 | M/64 |
| 95-B-Adeno G1 | A610063 | Biochain | Adenocarcinoma | 1 | F/54 |
| 12-B-Adeno G2 | A504119 | Biochain | Adenocarcinoma | 2 | F/74 |
| 75-B-Adeno G2 | A609217 | Biochain | Adenocarcinoma | 2 | M/65 |
| 77-B-Adeno G2 | A608301 | Biochain | Adenocarcinoma | 2 | M/44 |
| 13-B-Adeno G2-3 | A504116 | Biochain | Adenocarcinoma | 2-3 | M/64 |
| 89-B-Adeno G2-3 | A609077 | Biochain | Adenocarcinoma | 2-3 | M/62 |
| 76-B-Adeno G3 | A609218 | Biochain | Adenocarcinoma | 3 | M/57 |
| 94-B-Adeno G3 | A610118 | Biochain | Adenocarcinoma | 3 | M/68 |
| 3-CG-Adeno | CG-200 | Ichilov | Adenocarcinoma | | NA |
| 14-CG-Adeno | CG-111 | Ichilov | Adenocarcinoma | | M/68 |
| 15-CG-Bronch adeno | CG-244 | Ichilov | Bronchioloalveolar | | M/74 |
| | | | adenocarcinoma | | |
| 45-B-Alvelous Adeno | A501221 | Biochain | Alveolus | | F/50 |
| | | | carcinoma | | |
| 44-B-Alvelous Adeno G2 | A501123 | Biochain | Alveolus | 2 | F/61 |
| | | | carcinoma | | |
| 19-B-Squamous G1 | A408175 | Biochain | Squamous | 1 | M/78 |
| | | | carcinoma | | |
| 16-B-Squamous G2 | A409091 | Biochain | Squamous | 2 | F/68 |
| | | | carcinoma | | |
| 17-B-Squamous G2 | A503183 | Biochain | Squamous | 2 | M/57 |
| | | | carcinoma | | |
| 21-B-Squamous G2 | A503187 | Biochain | Squamous | 2 | M/52 |
| | | | carcinoma | | |
| 78-B-Squamous G2 | A607125 | Biochain | Squamous Cell | 2 | M/62 |
| | | | Carcinoma | | |
| 80-B-Squamous G2 | A609163 | Biochain | Squamous Cell | 2 | M/74 |
| | | | Carcinoma | | |
| 18-B-Squamous G2-3 | A503387 | Biochain | Squamous Cell | 2-3 | M/63 |
| | | | Carcinoma | | |
| 81-B-Squamous G3 | A609076 | Biochain | Squamous | 3 | m/53 |
| | | | Carcinoma | | |
| 79-B-Squamous G3 | A609018 | Biochain | Squamous Cell | 3 | M/67 |
| | | | Carcinoma | | |
| 20-B-Squamous | A501121 | Biochain | Squamous | | M/64 |
| | | | Carcinoma | | |
| 22-B-Squamous | A503386 | Biochain | Squamous | | M/48 |
| | | | Carcinoma | | |
| 88-B-Squamous | A609219 | Biochain | Squamous Cell | | M/64 |
| | | | Carcinoma | | |
| 100-B-Squamous | A409017 | Biochain | Squamous | | M/64 |
| | | | Carcinoma | | |
| 23-CG-Squamous | CG-109 (1) | Ichilov | Squamous | | M/65 |
| | | | Carcinoma | | |
| 24-CG-Squamous | CG-123 | Ichilov | Squamous | | M/76 |
| | | | Carcinoma | | |
| 25-CG-Squamous | CG-204 | Ichilov | Squamous | | M/72 |
| | | | Carcinoma | | |
| 87-B-Large cell G3 | A609165 | Biochain | Large Cell | 3 | F/47 |
| | | | Carcinoma | | |
| 38-B-Large cell | A504113 | Biochain | Large cell | | M/58 |
| 39-B-Large cell | A504114 | Biochain | Large cell | | F/35 |
| 82-B-Large cell | A609170 | Biochain | Large Cell | | M/68 |
| | | | Neuroendocrine | | |
| | | | Carcinoma | | |
| 30-B-Small cell carci G3 | A501389 | Biochain | small cell | 3 | M/34 |
| 31-B-Small cell carci G3 | A501390 | Biochain | small cell | 3 | F/59 |
| 32-B-Small cell carci G3 | A501391 | Biochain | small cell | 3 | M/30 |
| 33-B-Small cell carci G3 | A504115 | Biochain | small cell | 3 | M |
| 86-B-Small cell carci G3 | A608032 | Biochain | Small Cell | 3 | F/52 |
| | | | Carcinoma | | |
| 83-B-Small cell carci | A609162 | Biochain | Small Cell | | F/47 |
| | | | Carcinoma | | |
| 84-B-Small cell carci | A609167 | Biochain | Small Cell | | F/59 |
| | | | Carcinoma | | |
| 85-B-Small cell carci | A609169 | Biochain | Small Cell | | M/66 |
| | | | Carcinoma | | |
| 46-B-N M44 | A501124 | Biochain | Normal M44 | | F/61 |
| 47-B-N | A503205 | Biochain | Normal PM | | M/26 |
| 48-B-N | A503206 | Biochain | Normal PM | | M/44 |
| 49-B-N | A503384 | Biochain | Normal PM | | M/27 |
| 50-B-N | A503385 | Biochain | Normal PM | | M/28 |
| 90-B-N | A608152 | Biochain | Normal (Pool 2) | | pool 2 |
| | | | PM | | |
| 91-B-N | A607257 | Biochain | Normal (Pool 2) | | pool 2 |
| | | | PM | | |
| 92-B-N | A503204 | Biochain | Normal PM | | m/28 |
| 93-Am-N | 111P0103A | Ambion | Normal PM | | F/61 |
| 96-Am-N | 36853 | Ambion | Normal PM | | F/43 |
| 97-Am-N | 36854 | Ambion | Normal PM | | M/46 |
| 98-Am-N | 36855 | Ambion | Normal PM | | F/72 |
| 99-Am-N | 36856 | Ambion | Normal PM | | M/31 |

TABLE 6
Tissue samples in breast cancer testing panel

| sample rename | Lot no | source | pathology | grade | age | TNM | stage |
|---|---|---|---|---|---|---|---|
| 14-A-IDC G2 | A0135T | ABS | IDC | 2 | 37 | T2N2Mx | |
| 43-B-IDC G2 | A609183 | Biochain | IDC | 2 | 40 | | |
| 54-B-IDC G2 | A605353 | Biochain | IDC | 2 | 41 | | |
| 55-B-IDC G2 | A609179 | Biochain | IDC | 2 | 42 | | |
| 47-B-IDC G2 | A609221 | Biochain | IDC | 2 | 42 | | |
| 17-A-IDC G2 | 4904020036T | ABS | IDC | 2-3 | 42 | T3N1Mx | |
| 42-A-IDC G3 | 6005020031T | ABS | IDC | 3 | 42 | T1cN0Mx | |
| 7-A-IDC G2 | 7263T | ABS | IDC | 2 | 43 | T1N0M0 | stage 1 |
| 48-B-IDC G2 | A609222 | Biochain | IDC | 2 | 44 | | |
| 53-B-IDC G2 | A605151 | Biochain | IDC | 2 | 44 | | |
| 12-A-IDC G2 | 1432T | ABS | IDC | 2 | 46 | T2N0M0 | stage 2A |
| 61-B-IDC G2 | A610029 | Biochain | IDC | 2 | 46 | | |
| 46-B-Carci G2 | A609177 | Biochain | Carcinoma | 2 | 48 | | |
| 16-A-IDC G2 | 4904020032T | ABS | IDC | 2 | 49 | T3N1Mx | |
| 62-B-IDC G2 | A609194 | Biochain | IDC | 2 | 51 | | |
| 49-B-IDC G2 | A609223 | Biochain | IDC | 2 | 54 | | |
| 32-A-Muc Carci | 7116T | ABS | Mucinous | | 54 | T2N0M0 | stage 2A |
| | | | carcinoma | | | | |
| 45-B-IDC G2 | A609181 | Biochain | IDC | 2 | 58 | | |
| 15-A-IDC G2 | 7259T | ABS | IDC | 2 | 59 | T3N1M0 | stage 3A |
| 52-B-ILC G1 | A605360 | Biochain | Invasive | 1 | 60 | | |
| | | | Lobular | | | | |
| | | | Carcinoma | | | | |
| 6-A-IDC G1 | 7238T | ABS | IDC | 1 | 60 | T2N0M0 | stage 2A |
| 26-A-IDC G3 | 7249T | ABS | IDC | 3 | 60 | T2N0M0 | stage 2A |
| 13-A-IDC G2 | A0133T | ABS | IDC | 2 | 63 | T2N1aMx | |
| 50-B-IDC G2 | A609224 | Biochain | IDC | 2 | 69 | | |
| 44-B-IDC G2 | A609198 | Biochain | IDC | 2 | 77 | | |
| 51-B-IDC G1 | A605361 | Biochain | IDC | 1 | 79 | | |
| 31-CG-IDC | CG-154 | Ichilov | IDC | | 83 | | |
| 27-A-IDC G3 | 4907020072T | ABS | IDC | 3 | 91 | T2N0Mx | |
| 36-A-N M7 | 7263N | ABS | Normal | | 43 | | |
| | | | matched to | | | | |
| | | | 7T | | | | |
| 40-A-N M12 | 1432N | ABS | Normal | | 46 | | |
| | | | matched to | | | | |
| | | | 12T | | | | |
| 39-A-N M15 | 7259N | ABS | Normal | | 59 | | |
| | | | matched to | | | | |
| | | | 15T | | | | |
| 35-A-N M6 | 7238N | ABS | Normal | | 60 | | |
| | | | matched to | | | | |
| | | | 6T | | | | |
| 41-A-N M26 | 7249N | ABS | Normal | | 60 | | |
| | | | matched to | | | | |
| | | | 26T | | | | |
| 57-B-N | A609233 | Biochain | Normal PM | | 34 | | |
| 59-B-N | A607155 | Biochain | Normal PM | | 35 | | |
| 60-B-N | A609234 | Biochain | Normal PM | | 36 | | |
| 63-Am-N | 26486 | Ambion | Normal PS | | 43 | | |
| 66-Am-N | 36678 | Ambion | Normal PM | | 45 | | |
| 64-Am-N | 23036 | Ambion | Normal PM | | 57 | | |
| 56-B-N | A609235 | Biochain | Normal PM | | 59 | | |
| 65-Am-N | 31410 | Ambion | Normal PM | | 63 | | |
| 67-Am-N | 073P010602086A | Ambion | Normal PM | | 64 | | |
| 58-B-N | A609232 | Biochain | Normal PM | | 65 | | |

TABLE 7
Tissue samples in normal panel:

| | Lot no. | Source | Tissue | Pathology | Sex/Age |
|---|---|---|---|---|---|
| 1-Am-Colon (C71) | 071P10B | Ambion | Colon | PM | F/43 |
| 2-B-Colon (C69) | A411078 | Biochain | Colon | PM-Pool of 10 | M&F |
| 3-Cl-Colon (C70) | 1110101 | Clontech | Colon | PM-Pool of 3 | M&F |
| 4-Am-Small Intestine | 091P0201A | Ambion | Small Intestine | PM | M/75 |
| 5-B-Small Intestine | A501158 | Biochain | Small Intestine | PM | M/63 |
| 6-B-Rectum | A605138 | Biochain | Rectum | PM | M/25 |
| 7-B-Rectum | A610297 | Biochain | Rectum | PM | M/24 |
| 8-B-Rectum | A610298 | Biochain | Rectum | PM | M/27 |
| 9-Am-Stomach | 110P04A | Ambion | Stomach | PM | M/16 |
| 10-B-Stomach | A501159 | Biochain | Stomach | PM | M/24 |
| 11-B-Esophagus | A603814 | Biochain | Esophagus | PM | M/26 |
| 12-B-Esophagus | A603813 | Biochain | Esophagus | PM | M/41 |
| 13-Am-Pancreas | 071P25C | Ambion | Pancreas | PM | M/25 |
| 14-CG-Pancreas | CG-255-2 | Ichilov | Pancreas | PM | M/75 |
| 15-B-Lung | A409363 | Biochain | Lung | PM | F/26 |
| 16-Am-Lung (L93) | 111P0103A | Ambion | Lung | PM | F/61 |
| 17-B-Lung (L92) | A503204 | Biochain | Lung | PM | M/28 |
| 18-Am-Ovary (O47) | 061P43A | Ambion | Ovary | PM | F/16 |
| 19-B-Ovary (O48) | A504087 | Biochain | Ovary | PM | F/51 |
| 20-B-Ovary (O46) | A504086 | Biochain | Ovary | PM | F/41 |
| 21-Am-Cervix | 101P0101A | Ambion | Cervix | PM | F/40 |
| 22-B-Cervix | A408211 | Biochain | Cervix | PM | F/36 |
| 23-B-Cervix | A504089 | Biochain | Cervix | PM-Pool of 5 | M&F |
| 24-B-Uterus | A411074 | Biochain | Uterus | PM-Pool of 10 | M&F |
| 25-B-Uterus | A409248 | Biochain | Uterus | PM | F/43 |
| 26-B-Uterus | A504090 | Biochain | Uterus | PM-Pool of 5 | M&F |
| 27-B-Bladder | A501157 | Biochain | Bladder | PM | M/29 |
| 28-Am-Bladder | 071P02C | Ambion | Bladder | PM | M/20 |
| 29-B-Bladder | A504088 | Biochain | Bladder | PM-Pool of 5 | M&F |
| 30-Am-Placenta | 021P33A | Ambion | Placenta | PB | F/33 |
| 31-B-Placenta | A410165 | Biochain | Placenta | PB | F/26 |
| 32-B-Placenta | A411073 | Biochain | Placenta | PB-Pool of 5 | M&F |
| 33-B-Breast (B59) | A607155 | Biochain | Breast | PM | F/36 |
| 34-Am-Breast (B63) | 26486 | Ambion | Breast | PM | F/43 |
| 35-Am-Breast (B64) | 23036 | Ambion | Breast | PM | F/57 |
| 36-Cl-Prostate (P53) | 1070317 | Clontech | Prostate | PB-Pool of 47 | M&F |
| 37-Am-Prostate (P42) | 061P04A | Ambion | Prostate | PM | M/47 |
| 38-Am-Prostate (P59) | 25955 | Ambion | Prostate | PM | M/62 |
| 39-Am-Testis | 111P0104A | Ambion | Testis | PM | M/25 |
| 40-B-Testis | A411147 | Biochain | Testis | PM | M/74 |
| 41-Cl-Testis | 1110320 | Clontech | Testis | PB-Pool of 45 | M&F |
| 42-CG-Adrenal | CG-184-10 | Ichilov | Adrenal | PM | F/81 |
| 43-B-Adrenal | A610374 | Biochain | Adrenal | PM | F/83 |
| 44-B-Heart | A411077 | Biochain | Heart | PB-Pool of 5 | M&F |
| 45-CG-Heart | CG-255-9 | Ichilov | Heart | PM | M/75 |
| 46-CG-Heart | CG-227-1 | Ichilov | Heart | PM | F/36 |
| 47-Am-Liver | 081P0101A | Ambion | Liver | PM | M/64 |
| 48-CG-Liver | CG-93-3 | Ichilov | Liver | PM | F/19 |
| 49-CG-Liver | CG-124-4 | Ichilov | Liver | PM | F/34 |
| 50-Cl-BM | 1110932 | Clontech | Bone Marrow | PM-Pool of 8 | M&F |
| 51-CGEN-Blood | WBC#5 | CGEN | Blood | | M |
| 52-CGEN-Blood | WBC#4 | CGEN | Blood | | M |
| 53-CGEN-Blood | WBC#3 | CGEN | Blood | | M |
| 54-CG-Spleen | CG-267 | Ichilov | Spleen | PM | F/25 |
| 55-CG-Spleen | 111P0106B | Ambion | Spleen | PM | M/25 |
| 56-CG-Spleen | A409246 | Biochain | Spleen | PM | F/12 |
| 56-CG-Thymus | CG-98-7 | Ichilov | Thymus | PM | F/28 |
| 58-Am-Thymus | 101P0101A | Ambion | Thymus | PM | M/14 |
| 59-B-Thymus | A409278 | Biochain | Thymus | PM | M/28 |
| 60-B-Thyroid | A610287 | Biochain | Thyroid | PM | M/27 |
| 61-B-Thyroid | A610286 | Biochain | Thyroid | PM | M/24 |
| 62-CG-Thyroid | CG-119-2 | Ichilov | Thyroid | PM | F/66 |
| 63-Cl-Salivary Gland | 1070319 | Clontech | Salivary Gland | PM-Pool of 24 | M&F |
| 64-Am-Kidney | 111P0101B | Ambion | Kidney | PM-Pool of 14 | M&F |
| 65-Cl-Kidney | 1110970 | Clontech | Kidney | PM-Pool of 14 | M&F |
| 66-B-Kidney | A411080 | Biochain | Kidney | PM-Pool of 5 | M&F |
| 67-CG-Cerebellum | CG-183-5 | Ichilov | Cerebellum | PM | M/74 |
| 68-CG-Cerebellum | CG-212-5 | Ichilov | Cerebellum | PM | M/54 |
| 69-B-Brain | A411322 | Biochain | Brain | PM | M/28 |
| 70-Cl-Brain | 1120022 | Clontech | Brain | PM-Pool of 2 | M&F |
| 71-B-Brain | A411079 | Biochain | Brain | PM-Pool of 2 | M&F |
| 72-CG-Brain | CG-151-1 | Ichilov | Brain | PM | F/86 |
| 73-Am-Skeletal Muscle | 101P013A | Ambion | Skeletal Muscle | PM | F/28 |
| 74-Cl-Skeletal Muscle | 1061038 | Clontech | Skeletal Muscle | PM-Pool of 2 | M&F |

### Materials and Experimental Procedures

[0854] RNA preparation—RNA was obtained from Clontech (Franklin Lakes, N.J. USA 07417, www.clontech.com), BioChain Inst. Inc. (Hayward, Calif. 94545 USA www.biochain.com), ABS (Wilmington, Del. 19801, USA, www.absbioreagents.com), Ambion (Austin, Tex. 78744 USA, www.ambion.com), or GOG for ovary samples—Pediatic Cooperative Human Tissue Network, Gynecologic Oncology Group Tissue Bank, Children Hospital of Columbus (Columbus Ohio 43205 USA). Alternatively, RNA was generated from tissue samples using TRI-Reagent (Molecular Research Center), according to Manufacturer's instructions. Tissue and RNA samples were obtained from patients or from postmortem. Total RNA samples were treated with DNaseI (Ambion).

[0855] RT PCR—Purified RNA (1 μg) was mixed with 150 ng Random Hexamer primers (Invitrogen) and 500 μM dNTP in a total volume of 15.6 μl. The mixture was incubated for 5 min at 65° C. and then quickly chilled on ice. Thereafter, 5 μl of 5× SuperscriptII first strand buffer (Invitrogen), 2.4 μl 0.1M DTT and 40 units RNasin (Promega) were added, and the mixture was incubated for 10 min at 25° C., followed by further incubation at 42° C. for 2 min. Then, 1 μl (200 units) of SuperscriptII (Invitrogen) was added and the reaction (final volume of 25 μl) was incubated for 50 min at 42° C. and then inactivated at 70° C. for 15 min. The resulting cDNA was diluted 1:20 in TE buffer (10 mM Tris pH=8, 1 mM EDTA pH=8).

[0856] Real-Time RT-PCR analysis—cDNA (5 μL), prepared as described above, was used as a template in Real-Time PCR reactions using the SYBR Green I assay (PE Applied Biosystem) with specific primers and UNG Enzyme (Eurogentech or ABI or Roche). The amplification was effected as follows: 50° C. for 2 min, 95° C. for 10 min, and then 40 cycles of 95° C. for 15 sec, followed by 60° C. for 1 min. Detection was performed by using the PE Applied Biosystem SDS 7000. The cycle in which the reactions achieved a threshold level (Ct) of fluorescence was registered and was used to calculate the relative transcript quantity in the RT reactions. The relative quantity was calculated using the equation Q=efficiencŷ^{-Ct}. The efficiency of the PCR reaction was calculated from a standard curve, created by using serial dilutions of several reverse transcription (RT) reactions. To minimize inherent differences in the RT reaction, the resulting relative quantities were normalized to the geometric mean of the relative quantities of several housekeeping (HSKP) genes. Schematic summary of quantitative real-time PCR analysis is presented in FIG. 5. As shown, the x-axis shows the cycle number. The C_{T}=Threshold Cycle point, which is the cycle that the amplification curve crosses the fluorescence threshold that was set in the experiment. This point is a calculated cycle number in which PCR product signal is above the background level (passive dye ROX) and still in the Geometric/Exponential phase (as shown, once the level of fluorescence crosses the measurement threshold, it has a geometrically increasing phase, during which measurements are most accurate, followed by a linear phase and a plateau phase; for quantitative measurements, the latter two phases do not provide accurate measurements). The y-axis shows the normalized reporter fluorescence. It should be noted that this type of analysis provides relative quantification.

[0857] The sequences of the housekeeping genes measured in all the examples below on prostate panel were as follows:

SDHA (GenBank Accession No. NM_004168
(SEQ ID NO:4))
SDHA Forward primer (SEQ ID NO:27):
TGGGAACAAGAGGGCATCTG
SDHA Reverse primer (SEQ ID NO:28):
CCACCACTGCATCAAATTCATG
SDHA-amplicon (SEQ ID NO:29):
TGGGAACAAGAGGGCATCTGCTAAAGTTTCAGATTCCATTTCTGCTCAGT
ATCCAGTAGTGGATCATGAATTTGATGCAGTGGTGG
PBGD (GenBank Accession No. BC019323
(SEQ ID NO:6)),
PBGD Forward primer (SEQ ID NO:30):
TGAGAGTGATTCGCGTGGG
PBGD Reverse primer (SEQ ID NO:31):
CCAGGGTACGAGGCTTTCAAT
PBGD-amplicon (SEQ ID NO:32):
TGAGAGTGATTCGCGTGGGTACCCGCAAGAGCCAGCTTGCTCGCATACAG
ACGGACAGTGTGGTGGCAACATTGAAAGCCTCGTACCCTGG
HPRT1 (GenBank Accession No. NM_000194
(SEQ ID NO:5)),
HPRT1 Forward primer (SEQ ID NO:33):
TGACACTGGCAAAACAATGCA
HPRT1 Reverse primer (SEQ ID NO:34):
GGTCCTTTTCACCAGCAAGCT
HPRT1-amplicon (SEQ ID NO:35):
TGACACTGGCAAAACAATGCAGACTTTGCTTTCCTTGGTCAGGCAGTATA
ATCCAAAGATGGTCAAGGTCGCAAGCTTGCTGGTGAAAAGGACC
RPL19 (GenBank Accession No. NM_000981
(SEQ ID NO:7)
RPL19 Forward primer (SEQ ID NO:36):
TGGCAAGAAGAAGGTCTGGTTAG
RPL19 Reverse primer (SEQ ID NO:37):
TGATCAGCCCATCTTTGATGAG
RPL19-amplicon (SEQ ID NO:38):
TGGCAAGAAGAAGGTCTGGTTAGACCCCAATGAGACCAATGAAATCGCCA
ATGCCAACTCCCGTCAGCAGATCCGGAAGCTCATCAAAGATGGGCTGATC
A

[0858] The sequences of the housekeeping genes measured in all the examples on ovarian cancer panel were as follows:

SDHA (GenBank Accession No. NM_004168
(SEQ ID NO:4))
SDHA Forward primer (SEQ ID NO:27):
TGGGAACAAGAGGGCATCTG
SDHA Reverse primer (SEQ ID NO:28):
CCACCACTGCATCAAATTCATG
SDHA-amplicon (SEQ ID NO:29):
TGGGAACAAGAGGGCATCTGCTAAAGTTTCAGATTCCATTTCTGCTCAGT
ATCCAGTAGTGGATCATGAATTTGATGCAGTGGTGG
PBGD (GenBank Accession No. BC019323
(SEQ ID NO:6)),
PBGD Forward primer (SEQ ID NO:30):
TGAGAGTGATTCGCGTGGG
PBGD Reverse primer (SEQ ID NO:31):
CCAGGGTACGAGGCTTTCAAT
PBGD-amplicon (SEQ ID NO:32):
TGAGAGTGATTCGCGTGGGTACCCGCAAGAGCCAGCTTGCTCGCATACAG
ACGGACAGTGTGGTGGCAACATTGAAAGCCTCGTACCCTGG
HPRT1 (GenBank Accession No. NM_000194
(SEQ ID NO:5)),
HPRT1 Forward primer (SEQ ID NO:33):
TGACACTGGCAAAACAATGCA
HPRT1 Reverse primer (SEQ ID NO:34):
GGTCCTTTTCACCAGCAAGCT
HPRT1-amplicon (SEQ ID NO:35):
TGACACTGGCAAAACAATGCAGACTTTGCTTTCCTTGGTCAGGCAGTATA
ATCCAAAGATGGTCAAGGTCGCAAGCTTGCTGGTGAAAAGGACC
GAPDH (GenBank Accession No. BC026907
(SEQ ID NO:3))
GAPDH Forward primer (SEQ ID NO:39):
TGCACCACCAACTGCTTAGC
GAPDH Reverse primer (SEQ ID NO:40):
CCATCACGCCACAGTTTCC
GAPDH-amplicon (SEQ ID NO:41):
TGCACCACCAACTGCTTAGCACCCCTGGCCAAGGTCATCCATGACAACTT
TGGTATCGTGGAAGGACTCATGACCACAGTCCATGCCATCACTGCCACCC
AGAAGACTGTGGATGG

[0859] The sequences of the housekeeping genes measured in all the examples on colon cancer tissue testing panel were as follows:

PBGD (GenBank Accession No. BC019323
(SEQ ID NO:6)),
PBGD Forward primer (SEQ ID NO:30):
TGAGAGTGATTCGCGTGGG
PBGD Reverse primer (SEQ ID NO:31):
CCAGGGTACGAGGCTTTCAAT
PBGD-amplicon (SEQ ID NO:32):
TGAGAGTGATTCGCGTGGGTACCCGCAAGAGCCAGCTTGCTCGCATACAG
ACGGACAGTGTGGTGGCAACATTGAAAGCCTCGTACCCTGG
HPRT1 (GenBank Accession No. NM_000194
(SEQ ID NO:5)),
HPRT1 Forward primer (SEQ ID NO:33):
TGACACTGGCAAAACAATGCA
HPRT1 Reverse primer (SEQ ID NO:34):
GGTCCTTTTCACCAGCAAGCT
HPRT1-amplicon (SEQ ID NO:35):
TGACACTGGCAAAACAATGCAGACTTTGCTTTCCTTGGTCAGGCAGTATA
ATCCAAAGATGGTCAAGGTCGCAAGCTTGCTGGTGAAAAGGACC
G6PD (GenBank Accession No. NM_000402
(SEQ ID NO:8)
G6PD Forward primer (SEQ ID NO:42):
gaggccgtcaccaagaacat
G6PD Reverse primer (SEQ ID NO:43):
ggacagccggtcagagctc
G6PD-amplicon (SEQ ID NO:44):
gaggccgtcaccaagaacattcacgagtcctgcatgagccagataggctg
gaaccgcatcatcgtggagaagcccttcgggagggacctgcagagctctg
accggctgtcc
RPS27A (GenBank Accession No. NM_002954
(SEQ ID NO:1))
RPS27A Forward primer (SEQ ID NO:45):
CTGGCAAGCAGCTGGAAGAT
RPS27A Reverse primer (SEQ ID NO:46):
TTTCTTAGCACCACCACGAAGTC
RPS27A-amplicon (SEQ ID NO:47):
CTGGCAAGCAGCTGGAAGATGGACGTACTTTGTCTGACTACAATATTCAA
AAGGAGTCTACTCTTCATCTTGTGTTGAGACTTCGTGGTGGTGCTAAGAA
A

[0860] The sequences of the housekeeping genes measured in all the examples in testing panel were as follows:

Ubiquitin (GenBank Accession No. BC000449
(SEQ ID NO:9))
Ubiquitin Forward primer (SEQ ID NO:48):
ATTTGGGTCGCGGTTCTTG
Ubiquitin Reverse primer (SEQ ID NO:49):
TGCCTTGACATTCTCGATGGT
Ubiquitin-amplicon (SEQ ID NO:50):
ATTTGGGTCGCGGTTCTTGTTTGTGGATCGCTGTGATCGTCACTTGACAA
TGCAGATCTTCGTGAAGACTCTGACTGGTAAGACCATCACCCTCGAGGTT
GAGCCCAGTGACACCATCGAGAATGTCAAGGCA
SDHA (GenBank Accession No. NM_004168
(SEQ ID NO:4))
SDHA Forward primer (SEQ ID NO:27):
TGGGAACAAGAGGGCATCTG
SDHA Reverse primer (SEQ ID NO:28):
CCACCACTGCATCAAATTCATG
SDHA-amplicon (SEQ ID NO:29):
TGGGAACAAGAGGGCATCTGCTAAAGTTTCAGATTCCATTTCTGCTCAGT
ATCCAGTAGTGGATCATGAATTTGATGCAGTGGTGG
PBGD (GenBank Accession No. BC019323
(SEQ ID NO:6)),
PBGD Forward primer (SEQ ID NO:30):
TGAGAGTGATTCGCGTGGG
PBGD Reverse primer (SEQ ID NO:31):
CCAGGGTACGAGGCTTTCAAT
PBGD-amplicon (SEQ ID NO:32):
TGAGAGTGATTCGCGTGGGTACCCGCAAGAGCCAGCTTGCTCGCATACAG
ACGGACAGTGTGGTGGCAACATTGAAAGCCTCGTACCCTGG
HPRT1 (GenBank Accession No. NM_000194
(SEQ ID NO:5)),
HPRT1 Forward primer (SEQ ID NO:33):
TGACACTGGCAAAACAATGCA
HPRT1 Reverse primer (SEQ ID NO:34):
GGTCCTTTTCACCAGCAAGCT
HPRT1-amplicon (SEQ ID NO:35):
TGACACTGGCAAAACAATGCAGACTTTGCTTTCCTTGGTCAGGCAGTATA
ATCCAAAGATGGTCAAGGTCGCAAGCTTGCTGGTGAAAAGGACC

[0861] The sequences of the housekeeping genes measured in all the examples on breast cancer panel were as follows:

G6PD (GenBank Accession No. NM_000402
(SEQ ID NO:8))
G6PD Forward primer (SEQ ID NO:42):
gaggccgtcaccaagaacat
G6PD Reverse primer (SEQ ID NO:43):
ggacagccggtcagagctc
G6PD-amplicon (SEQ ID NO:44):
gaggccgtcaccaagaacattcacgagtcctgcatgagccagataggctg
gaaccgcatcatcgtggagaagcccttcgggagggacctgcagagctctg
accggctgtcc
SDHA (GenBank Accession No. NM_004168
(SEQ ID NO:4))
SDHA Forward primer (SEQ ID NO:27):
TGGGAACAAGAGGGCATCTG
SDHA Reverse primer (SEQ ID NO:28):
CCACCACTGCATCAAATTCATG
SDHA-amplicon (SEQ ID NO:29):
TGGGAACAAGAGGGCATCTGCTAAAGTTTCAGATTCCATTTCTGCTCAGT
ATCCAGTAGTGGATCATGAATTTGATGCAGTGGTGG
PBGD (GenBank Accession No. BC019323
(SEQ ID NO:6)),
PBGD Forward primer (SEQ ID NO:30):
TGAGAGTGATTCGCGTGGG
PBGD Reverse primer (SEQ ID NO:31):
CCAGGGTACGAGGCTTTCAAT
PBGD-amplicon (SEQ ID NO:32):
TGAGAGTGATTCGCGTGGGTACCCGCAAGAGCCAGCTTGCTCGCATACAG
ACGGACAGTGTGGTGGCAACATTGAAAGCCTCGTACCCTGG
HPRT1 (GenBank Accession No. NM_000194
(SEQ ID NO:5)),
HPRT1 Forward primer (SEQ ID NO:33):
TGACACTGGCAAAACAATGCA
HPRT1 Reverse primer (SEQ ID NO:34):
GGTCCTTTTCACCAGCAAGCT
HPRT1-amplicon (SEQ ID NO:35):
TGACACTGGCAAAACAATGCAGACTTTGCTTTCCTTGGTCAGGCAGTATA
ATCCAAAGATGGTCAAGGTCGCAAGCTTGCTGGTGAAAAGGACC

[0862] The sequences of the housekeeping genes measured in all the examples on normal tissue samples panel were as follows:

RPL19 (GenBank Accession No. NM_000981
(SEQ ID NO:7)
RPL19 Forward primer (SEQ ID NO:36):
TGGCAAGAAGAAGGTCTGGTTAG
RPL19 Reverse primer (SEQ ID NO:37):
TGATCAGCCCATCTTTGATGAG
RPL19-amplicon (SEQ ID NO:38):
TGGCAAGAAGAAGGTCTGGTTAGACCCCAATGAGACCAATGAAATCGCCA
ATGCCAACTCCCGTCAGCAGATCCGGAAGCTCATCAAAGATGGGCTGATC
A
TATA box (GenBank Accession No. NM_003194
(SEQ ID NO:2)),
TATA box Forward primer (SEQ ID NO:51):
CGGTTTGCTGCGGTAATCAT
TATA box Reverse primer (SEQ ID NO:52):
TTTCTTGCTGCCAGTCTGGAC
TATA box-amplicon (SEQ ID NO:53):
CGGTTTGCTGCGGTAATCATGAGGATAAGAGAGCCACGAACCACGGCACT
GATTTTCAGTTCTGGGAAAATGGTGTGCACAGGAGCCAAGAGTGAAGAAC
AGTCCAGACTGGCAGCAAGAAA
Ubiquitin (GenBank Accession No. BC000449
(SEQ ID NO:9))
Ubiquitin Forward primer (SEQ ID NO:48):
ATTTGGGTCGCGGTTCTTG
Ubiquitin Reverse primer (SEQ ID NO:49):
TGCCTTGACATTCTCGATGGT
Ubiquitin-amplicon (SEQ ID NO:50):
ATTTGGGTCGCGGTTCTTGTTTGTGGATCGCTGTGATCGTCACTTGACAA
TGCAGATCTTCGTGAAGACTCTGACTGGTAAGACCATCACCCTCGAGGTT
GAGCCCAGTGACACCATCGAGAATGTCAAGGCA
SDHA (GenBank Accession No. NM_004168
(SEQ ID NO:4))
SDHA Forward primer (SEQ ID NO:27):
TGGGAACAAGAGGGCATCTG
SDHA Reverse primer (SEQ ID NO:28):
CCACCACTGCATCAAATTCATG
SDHA-amplicon (SEQ ID NO:29):
TGGGAACAAGAGGGCATCTGCTAAAGTTTCAGATTCCATTTCTGCTCAGT
ATCCAGTAGTGGATCATGAATTTGATGCAGTGGTGG

### Actual Marker Examples

[0863] The following examples relate to specific actual marker examples. It should be noted that Table and Figures numbering is restarted within each example related to a particular Cluster, as indicated by the titles below.

### Description for Cluster N56180

[0864] Cluster N56180 features 7 transcript(s) and 22 segment(s) of interest, the names for which are given in Tables 8 and 9, respectively. The selected protein variants are given in table 10.

TABLE 8
Transcripts of interest
Transcript Name

N56180_T1 (SEQ ID NO: 54)
N56180_T3 (SEQ ID NO: 55)
N56180_T4 (SEQ ID NO: 56)
N56180_T5 (SEQ ID NO: 57)
N56180_T6 (SEQ ID NO: 58)
N56180_T7 (SEQ ID NO: 59)
N56180_T8 (SEQ ID NO: 60)

TABLE 9
Segments of interest

| Segment Name | Corresponding Transcripts |
|---|---|
| N56180_node_2 (SEQ ID NO: 61) | N56180_T1 (SEQ ID NO: 54), N56180_T3 |
| | (SEQ ID NO: 55), N56180_T4 (SEQ ID NO: 56) |
| N56180_node_4 (SEQ ID NO: 62) | N56180_T1 (SEQ ID NO: 54), N56180_T3 |
| | (SEQ ID NO: 55), N56180_T4 (SEQ ID |
| | NO: 56), N56180_T5 (SEQ ID NO: 57) and |
| | N56180_T8 (SEQ ID NO: 60) |
| N56180_node_6 (SEQ ID NO: 63) | N56180_T3 (SEQ ID NO: 55) |
| N56180_node_20 (SEQ ID NO: 64) | N56180_T1 (SEQ ID NO: 54), N56180_T3 |
| | (SEQ ID NO: 55), N56180_T4 (SEQ ID |
| | NO: 56), N56180_T5 (SEQ ID NO: 57), |
| | N56180_T6 (SEQ ID NO: 58) and |
| | N56180_T8 (SEQ ID NO: 60) |
| N56180_node_22 (SEQ ID NO: 65) | N56180_T8 (SEQ ID NO: 60) |
| N56180_node_28 (SEQ ID NO: 66) | N56180_T7 (SEQ ID NO: 59) |
| N56180_node_34 (SEQ ID NO: 67) | N56180_T1 (SEQ ID NO: 54), N56180_T3 |
| | (SEQ ID NO: 55), N56180_T4 (SEQ ID |
| | NO: 56), N56180_T5 (SEQ ID NO: 57), |
| | N56180_T6 (SEQ ID NO: 58) and |
| | N56180_T7 (SEQ ID NO: 59) |
| N56180_node_36 (SEQ ID NO: 68) | N56180_T1 (SEQ ID NO: 54), N56180_T3 |
| | (SEQ ID NO: 55), N56180_T4 (SEQ ID |
| | NO: 56), N56180_T5 (SEQ ID NO: 57), |
| | N56180_T6 (SEQ ID NO: 58) and |
| | N56180_T7 (SEQ ID NO: 59) |
| N56180_node_0 (SEQ ID NO: 69) | N56180_T5 (SEQ ID NO: 57) |
| N56180_node_3 (SEQ ID NO: 70) | N56180_T1 (SEQ ID NO: 54), N56180_T3 |
| | (SEQ ID NO: 55), N56180_T4 (SEQ ID |
| | NO: 56) and N56180_T8 (SEQ ID NO: 60) |
| N56180_node_8 (SEQ ID NO: 71) | N56180_T1 (SEQ ID NO: 54), N56180_T3 |
| | (SEQ ID NO: 55), N56180_T4 (SEQ ID |
| | NO: 56), N56180_T5 (SEQ ID NO: 57) and |
| | N56180_T8 (SEQ ID NO: 60). Table 29 |
| N56180_node_10 (SEQ ID NO: 72) | N56180_T1 (SEQ ID NO: 54), N56180_T3 |
| | (SEQ ID NO: 55), N56180_T4 (SEQ ID |
| | NO: 56) and N56180_T8 (SEQ ID NO: 60) |
| N56180_node_12 (SEQ ID NO: 73) | N56180_T1 (SEQ ID NO: 54), N56180_T3 |
| | (SEQ ID NO: 55) and N56180_T8 (SEQ ID NO: 60) |
| N56180_node_14 (SEQ ID NO: 74) | N56180_T1 (SEQ ID NO: 54), N56180_T3 |
| | (SEQ ID NO: 55), N56180_T5 (SEQ ID |
| | NO: 57) and N56180_T8 (SEQ ID NO: 60) |
| N56180_node_16 (SEQ ID NO: 75) | N56180_T1 (SEQ ID NO: 54) |
| N56180_node_18 (SEQ ID NO: 76) | N56180_T6 (SEQ ID NO: 58) |
| N56180_node_24 (SEQ ID NO: 77) | N56180_T1 (SEQ ID NO: 54), N56180_T3 |
| | (SEQ ID NO: 55), N56180_T4 (SEQ ID |
| | NO: 56), N56180_T5 (SEQ ID NO: 57) and |
| | N56180_T6 (SEQ ID NO: 58) |
| N56180_node_26 (SEQ ID NO: 78) | N56180_T1 (SEQ ID NO: 54), N56180_T3 |
| | (SEQ ID NO: 55), N56180_T4 (SEQ ID |
| | NO: 56), N56180_T5 (SEQ ID NO: 57) and |
| | N56180_T6 (SEQ ID NO: 58) |
| N56180_node_29 (SEQ ID NO: 79) | N56180_T1 (SEQ ID NO: 54), N56180_T3 |
| | (SEQ ID NO: 55), N56180_T4 (SEQ ID |
| | NO: 56), N56180_T5 (SEQ ID NO: 57), |
| | N56180_T6 (SEQ ID NO: 58) and |
| | N56180_T7 (SEQ ID NO: 59) |
| N56180_node_31 (SEQ ID NO: 80) | N56180_T1 (SEQ ID NO: 54), N56180_T3 |
| | (SEQ ID NO: 55), N56180_T4 (SEQ ID |
| | NO: 56), N56180_T5 (SEQ ID NO: 57), |
| | N56180_T6 (SEQ ID NO: 58) and |
| | N56180_T7 (SEQ ID NO: 59) |
| N56180_node_33 (SEQ ID NO: 81) | N56180_T1 (SEQ ID NO: 54), N56180_T3 |
| | (SEQ ID NO: 55), N56180_T4 (SEQ ID |
| | NO: 56), N56180_T5 (SEQ ID NO: 57), |
| | N56180_T6 (SEQ ID NO: 58) and |
| | N56180_T7 (SEQ ID NO: 59) |
| N56180_node_35 (SEQ ID NO: 82) | N56180_T1 (SEQ ID NO: 54), N56180_T3 |
| | (SEQ ID NO: 55), N56180_T4 (SEQ ID |
| | NO: 56), N56180_T5 (SEQ ID NO: 57), |
| | N56180_T6 (SEQ ID NO: 58) and |
| | N56180_T7 (SEQ ID NO: 59) |

TABLE 10
Proteins of interest

| Protein Name | Corresponding Transcript(s) |
|---|---|
| N56180_P2 (SEQ ID NO: 84) | N56180_T1 (SEQ ID NO: 54) |
| N56180_P4 (SEQ ID NO: 85) | N56180_T3 (SEQ ID NO: 55) |
| N56180_P5 (SEQ ID NO: 86) | N56180_T4 (SEQ ID NO: 56) |
| N56180_P6 (SEQ ID NO: 87) | N56180_T5 (SEQ ID NO: 57) |
| N56180_P7 (SEQ ID NO: 88) | N56180_T6 (SEQ ID NO: 58) |
| N56180_P8 (SEQ ID NO: 89) | N56180_T7 (SEQ ID NO: 59) |
| N56180_P9 (SEQ ID NO: 90) | N56180_T8 (SEQ ID NO: 60) |

[0865] These sequences are variants of the known protein Calsequestrin, cardiac muscle isoform precursor (SwissProt accession identifier CAQ2_HUMAN (SEQ ID NO:83); known also according to the synonyms Calsequestrin 2), referred to herein as the previously known protein.

[0866] Protein Calsequestrin, cardiac muscle isoform precursor (SEQ ID NO: 83) is known or believed to have the following function(s): Calsequestrin is a high-capacity, moderate affinity, calcium-binding protein and thus acts as an internal calcium store in muscle. The release of calcium bound to calsequestrin through a calcium release channel triggers muscle contraction. Binds 40 to 50 moles of calcium (By similarity). Known polymorphisms for this sequence are as shown in Table 11.

TABLE 11
Amino acid mutations for Known Protein

| SNP position(s) on amino | |
|---|---|
| acid sequence | Comment |
| 307 | D -> H (in VTSIP). /FTId = VAR_016075. |
| 67 | Q -> P |

[0867] Protein Calsequestrin, cardiac muscle isoform precursor (SEQ ID NO: 83) localization is believed to be This isoform of calsequestrin occurs in the sarcoplasmic reticulum's terminal cisternae luminal spaces of cardiac and slow skeletal muscle cells.

[0868] The following GO Annotation(s) apply to the previously known protein. The following annotation(s) were found: striated muscle contraction; heart development; muscle development, which are annotation(s) related to Biological Process; calcium storage, which are annotation(s) related to Molecular Function; and smooth endoplasmic reticulum, which are annotation(s) related to Cellular Component.

[0869] The GO assignment relies on information from one or more of the SwissProt/TremBl Protein knowledgebase, available from <http://www.expasy.ch/sprot/>; or Locuslink, available from <http://www.ncbi.nlm.nih.gov/projects/LocusLink/>.

[0870] According to optional but preferred embodiments of the present invention, variants of this cluster according to the present invention (amino acid and/or nucleic acid sequences of N56180) may optionally have one or more of the following utilities, as described with regard to the Table 12 below. It should be noted that these utilities are optionally and preferably suitable for human and non-human animals as subjects, except where otherwise noted. The reasoning is described with regard to biological and/or physiological and/or other information about the known protein, but is given to demonstrate particular diagnostic utility for the variants according to the present invention.

TABLE 12
Utilities for Variants of N56180, related to Calsequestrin, cardiac muscle isoform:
CAQ2_HUMAN (SEQ ID NO: 83)

| | | |
|---|---|---|
| Biomarker for | calsequestrin 2 mutations causes | Circ Res. 2002 Oct |
| catecholaminergic polymorphic | severe forms of | 18; 91(8): e21-6. |
| ventricular tachycardia | catecholaminergic polymorphic | Am J Hum Genet. 2001 |
| (CPVT) | ventricular tachycardia | Dec; 69(6): 1378-84. Epub 2001 |
| | | Oct 25. |
| | | Cold Spring Harb Symp Quant |
| | | Biol. 2002; 67: 333-7. |
| | | Trends Cardiovasc Med. 2003 |
| | | May; 13(4): 148-51. |
| Marker for predisposition for | Abnormal calcium signaling and | Circ Res. 2004 Mar |
| sudden cardiac death | sudden cardiac death associated | 5; 94(4): 471-7. Epub 2004 Jan |
| | with mutation of calsequestrin | 08. |
| cardiotoxicity | Interaction between cardiac | Mol Pharmacol. 2005 |
| | calsequestrin and drugs with | Jan; 67(1): 97-104. Epub 2004 |
| | known cardiotoxicity. | Oct 18. |
| Biomarker for heart failure | transgenic mice overexpressing | J Pharmacol Exp Ther. 2000 |
| | both NCX and CSQ | Aug; 294(2): 648-57. |
| | (calsequestrin) | |
| dystrophic skeletal muscle. | Subproteomics analysis of Ca+- | Eur J Biochem. 2004 |
| | binding proteins demonstrates | Oct; 271(19): 3943-52. |
| | decreased calsequestrin | |
| | expression in dystrophic mouse | |
| | skeletal muscle. | |
| left ventricular hypertrophy, | Cardiac-specific overexpression | J Mol Cell Cardiol. 2000 |
| depressed force-frequency | of calsequestrin results in left | Sep; 32(9): 1735-44. |
| relation and pulsus alternans | ventricular hypertrophy, | |
| | depressed force-frequency | |
| | relation and pulsus alternans in | |
| | vivo. (in mice) | |
| Abnormal Ca2+ release and | CASQ2), as well as other genes | Hum Mol Genet. 2005 Mar 9; |
| catecholamine-induced | encoding proteins involved in | [Epub ahead of print] |
| arrhythmias in mitochondrial | SR Ca(2+) handling, showed | |
| cardiomyopathy | decreased expression in Tfam | |
| | knockout hearts | |
| ventricular arrhythmias | Abnormal restitution of the | Biol Res. 2004; 37(4): 603-7. |
| | Ca2+ release channels from a | |
| | luminal Ca-dependent refractory | |
| | state could account for | |
| | ventricular arrhythmias | |
| | associated with mutations in the | |
| | CASQ2 gene. | |
| impairs cardiac function | Overexpression of the | Biochem J. 2003 Apr 1; 371(Pt |
| (Prenatal glucocorticoid | conserved Ca(2+)-binding | 1): 61-9. |
| overexposure) | proteins calreticulin and | |
| | calsequestrin impairs cardiac | |
| | function, leading to premature | |
| | death. | |
| | Prenatal glucocorticoid | |
| | overexposure at the higher dose | |
| | decreased calreticulin protein | |
| | expression (26%; P < 0.05) but | |
| | increased calsequestrin protein | |
| | expression, both 55 and 63 kDa | |
| | bands, by 87% (P < 0.01) and | |
| | 78% (P < 0.01); only the 55 kDa | |
| | calsequestrin band was | |
| | increased at the lower dose | |
| | (66%; P < 0.05). | |
| Cardiac hypertrophy | overexpression of calsequestrin | Proc Natl Acad Sci USA. 2004 |
| | | Mar 2; 101(9): 3106-11. Epub |
| | | 2004 Feb 20. |
| hypertrophy, heart failure, and | Transgenic cardiac | Am J Physiol Heart Circ |
| premature death. | overexpression of canine | Physiol. 2004 |
| | calsequestrin (CSQ) showed | Sep; 287(3): H1096-103. Epub |
| | hypertrophy, heart failure, and | 2004 May 6 |
| | premature death. | |
| cardiac hypertrophy and dilated | Transgenic mice overexpressing | Cell Calcium. 2002 |
| cardiomyopathy | CSQ at the age of 7 weeks | Jul; 32(1): 21-9. |
| | exhibit concentric cardiac | |
| | hypertrophy, and by 13 weeks | |
| | the condition progresses to | |
| | dilated cardiomyopathy. | |
| depressed cardiovascular | Cardiac-specific overexpression | J Biol Chem. 1998 Oct |
| function and hypertrophy | of mouse cardiac calsequestrin | 23; 273(43): 28470-7. |
| | is associated with depressed | |
| | cardiovascular function and | |
| | hypertrophy in transgenic mice. | |

[0871] According to other optional embodiments of the present invention, variants of this cluster according to the present invention (amino acid and/or nucleic acid sequences of N56180) may optionally have one or more of the following utilities, some of which are related to utilities described above. It should be noted that these utilities are optionally and preferably suitable for human and non-human animals as subjects, except where otherwise noted.

[0872] A non-limiting example of such a utility is the detection, diagnosis and/or determination of ovarian or uterine serous papillary carcinoma. The method comprises detecting a N56180 variant, for example a variant protein, protein fragment, peptide, polynucleotide, polynucleotide fragment and/or oligonucleotide as described herein, optionally and preferably in a serum sample. The expression levels of the N56180 variant as determined in a patient can be further compared to those in a normal individual.

[0873] At least 5-fold higher expression of the known CAQ2_HUMAN (SEQ ID NO:83) gene in uterine serous papillary carcinoma as compared with Normal Endometrial Epithelial Cells is described with regard to PCT Application No. WO04108896, hereby incorporated by reference as if fully set forth herein.

[0874] Oligonucleotide microarrays were used to profile and compare gene expression patterns between uterine serous papillary carcinoma and ovarian serous papillary carcinoma or normal endometrial epithelial cells. mRNA fingerprints readily distinguish the more biologically aggressive and chemotherapy resistant USPC from OSPC or NEC. The known CAQ2_HUMAN (SEQ ID NO:83) gene is strikingly overexpressed in uterine serous papillary carcinoma as compared with Normal Endometrial Epithelial Cells and may therefore represent a novel diagnostic and therapeutic marker for this highly aggressive subset of endometrial tumors.

[0875] Another non-limiting example of such a utility is the detection, diagnosis and/or determination the condition of an ailing organ. Although applicable to numerous organ and organ systems, the CAQ2 variants can be preferably used as marker for diagnosing and distinguishing congestive heart failure. The method comprises detecting a N56180 variant, for example a variant protein, protein fragment, peptide, polynucleotide, polynucleotide fragment and/or oligonucleotide as described herein, optionally and preferably in a serum sample. The expression levels of the N56180 variant as determined in a patient can be further compared to those in a normal individual, and can be used for monitoring disease progression and efficacy of therapeutic agents.

[0876] Use of the known CAQ2_HUMAN (SEQ ID NO:83) gene within a diagnostic kit for rapidly diagnosing organ damage, and more preferably heart damage, in a patient is described with regard to WO03020123 patent application, hereby incorporated by reference as if fully set forth herein. The WO03020123 patent application also describes the use of the known CAQ2_HUMAN (SEQ ID NO:83) gene for predicting cardiac mortality rate in a patient.

[0877] According to preferred embodiments of the present invention, the levels of the N56180 variant can be used for detection, diagnosis and/or determination the condition of an ailing organ, more preferably for detection, diagnosis and/or determination of heart damage and for predicting cardiac mortality rate in a patient.

[0878] The gene STB2 (NM_{—}138959 (SEQ ID NO:696); NP_{—}620409 (SEQ ID NO:697)) (VANGL1) is antisense with CASQ2 gene on human chromosome 1p13 in a tail to tail orientation, and may therefore be co-regulated and co-expressed with one or more N56180 variants according to the present invention, and hence may have one or more diagnostic utilities of N56180 variants according to the present invention as described herein.

[0879] STB1 and STB2 genes are located around cancer susceptibility loci or recombination hot spots in the human genome. STB1 is moderately expressed in K-562 (leukemia), G-361 (melanoma), and MKN7 (gastric cancer) cells. STB2 is highly expressed in MKN28, MKN74 (gastric cancer), BxPC-3, PSN-1, and Hs766T (pancreatic cancer) cells. On the other hand, STB1 and STB2 are significantly down-regulated in several cancer cell lines and primary tumors. Xenopus homologue of human STB1 and STB2 regulates negatively the WNT-beta-catenin signaling pathway. Loss-of-function mutations of genes encoding negative regulators of WNT-beta-catenin signaling pathway lead to carcinogenesis. Based on functional aspects and human chromosomal loci, the STB1 and STB2 genes are predicted to be potent tumor suppressor gene candidates. STB1 and STB2 might be suitable targets for tissue engineering in the field of re-generative medicine and for chemoprevention and treatment in the field of clinical oncology. (Katoh M. Int J Mol Med. 2002 July; 10(1): 11-5).

[0880] Table 13 below describes diagnostic utilities for the cluster N56180 that were found through microarrays, including the statistical significance thereof and a reference. One or more N56180 variants according to the present invention may optionally have one or more of these utilities.

TABLE 13

| | Statistical | |
|---|---|---|
| Diagnostic utility | significance | reference |
| Gene over expressed in | 1.2E−4 | LaTulippe E, Gerald WL Cancer Research (2002) |
| Primary Prostate Carcinoma | | Comprehensive Gene Expression Analysis of |
| (vs. metastasis). | | Prostate Cancer Reveals Distinct Transcriptional |
| | | Programs Associated with Metastatic Disease |
| Gene over expressed in Non- | 1.1E−10 | Nutt CL, Louis DN. Cancer Res (2003) Gene |
| Classic Glioma (vs. | | expression-based classification of malignant gliomas |
| Classical). | | correlates better with survival than histological |
| | | classification. |
| Gene over expressed in | | GNF database |
| leiomyomas (vs. normal | | (http://www.ncbi.nlm.nih.gov/projects/geo/): |
| uterus). | | GDS484, probe ID: 207317_s_at. |
| Gene under expressed in | | GNF database |
| ischemic cardiomyopathy | | (http://www.ncbi.nlm.nih.gov/projects/geo/): |
| (vs. idiopathic dilated | | GDS651, probe ID: 207317_s_at. |
| cardiomyopathy). Can be | | |
| used in combination with | | |
| other CHF and MI markers | | |
| for differential diagnosis and | | |
| treatment regiment decisions. | | |

[0881] Other non-limiting exemplary utilities for N56180 variants according to the present invention are described in greater detail below and also with regard to the previous section on clinical utility.

[0882] The heart-selective diagnostic marker prediction engine provided the following results with regard to cluster N56180. Predictions were made for selective expression of transcripts of this contig in heart tissue, according to the previously described methods. The numbers on the y-axis of the first figure below refer to weighted expression of ESTs in each category, as “parts per million” (ratio of the expression of ESTs for a particular cluster to the expression of all ESTs in that category, according to parts per million).

[0883] Overall, the following results were obtained as shown with regard to the histogram in FIG. 6, concerning the number of heart-specific clones in libraries/sequences; as well as with regard to the histogram in FIG. 7, concerning the actual expression of oligonucleotides in various tissues, including heart.

[0884] This cluster was found to be selectively expressed in heart for the following reasons: in a comparison of the ratio of expression of the cluster in heart specific ESTs to the overall expression of the cluster in non-heart ESTs, which was found to be 11.2; the ratio of expression of the cluster in heart specific ESTs to the overall expression of the cluster in muscle-specific ESTs which was found to be 2.4; and fisher exact test P-values were computed both for library and weighted clone counts to check that the counts are statistically significant, and were found to be 4.30E-14.

[0885] One particularly important measure of specificity of expression of a cluster in heart tissue is the previously described comparison of the ratio of expression of the cluster in heart as opposed to muscle. This cluster was found to be specifically expressed in heart as opposed to non-heart ESTs as described above. However, many proteins have been shown to be generally expressed at a higher level in both heart and muscle, which is less desirable. For this cluster, as described above, the ratio of expression of the cluster in heart specific ESTs to the overall expression of the cluster in muscle-specific ESTs which was found to be 11.2, which clearly supports specific expression in heart tissue.

[0886] As noted above, cluster N56180 features 7 transcript(s), which were listed in Table 8 above. These transcript(s) encode for protein(s) which are variant(s) of protein Calsequestrin, cardiac muscle isoform precursor (SEQ ID NO: 83). A description of each variant protein according to the present invention is now provided.

[0887] Variant protein N56180_P2 (SEQ ID NO:84) according to the present invention has an amino acid sequence; it is encoded by transcript(s) N56180_T1 (SEQ ID NO:54). An alignment is given to the known protein (Calsequestrin, cardiac muscle isoform precursor (SEQ ID NO: 83)). One or more alignments to one or more previously published protein sequences are given in the alignment table located on the attached CDROM. A brief description of the relationship of the variant protein according to the present invention to each such aligned protein is as follows:

[0888] Comparison report between N56180_P2 (SEQ ID NO:84) and CAQ2_HUMAN (SEQ ID NO:83):

[0889] 1. An isolated chimeric polypeptide encoding for N56180_P2 (SEQ ID NO:84), comprising a first amino acid sequence being at least 90% homologous to MKRTHLFIVGIYFLSSCRAEEGLNFPTYDGKDRVVSLSEKNFKQVLKKYDLLCLYYHEPVSSDKVT QKQFQLKEIVLELVAQVLEHKAIGFVMVDAKKEAKLAKKLGFDEEGSLYILKGDRTIEFDGEFAA DVLVEFLLDLIEDPVEIISSKLEVQAFERIEDYIKLIGFFKSEDSEYYKAFEEAAEHFQPYIKFFATFD KGV corresponding to amino acids 1-203 of CAQ2_HUMAN (SEQ ID NO:83), which also corresponds to amino acids 1-203 of N56180_P2 (SEQ ID NO:84), and a second amino acid sequence being at least 70%, optionally at least 80%, preferably at least 85%, more preferably at least 90% and most preferably at least 95% homologous to a polypeptide having the sequence LWLTPVIPTLWEADGGGLHEPWSWRPAWATWLQRNYL (SEQ ID NO: 628) corresponding to amino acids 204-240 of N56180_P2 (SEQ ID NO:84), wherein said first amino acid sequence and second amino acid sequence are contiguous and in a sequential order.

[0890] 2. An isolated polypeptide encoding for a tail of N56180_P2 (SEQ ID NO:84), comprising a polypeptide being at least 70%, optionally at least about 80%, preferably at least about 85%, more preferably at least about 90% and most preferably at least about 95% homologous to the sequence LWLTPVIPTLWEADGGGLHEPWSWRPAWATWLQRNYL (SEQ ID NO: 628) in N56180_P2 (SEQ ID NO:84).

[0891] The location of the variant protein was determined according to results from a number of different software programs and analyses, including analyses from SignalP and other specialized programs. The variant protein is believed to be located as follows with regard to the cell: secreted. The protein localization is believed to be secreted because both signal-peptide prediction programs predict that this protein has a signal peptide, and neither trans-membrane region prediction program predicts that this protein has a trans-membrane region.

[0892] The glycosylation sites of variant protein N56180_P2 (SEQ ID NO:84), as compared to the known protein Calsequestrin, cardiac muscle isoform precursor (SEQ ID NO: 83), are described in Table 14 (given according to their position(s) on the amino acid sequence in the first column; the second column indicates whether the glycosylation site is present in the variant protein; and the last column indicates whether the position is different on the variant protein).

TABLE 14
Glycosylation site(s)

| Position(s) on known | Present in | Position in |
|---|---|---|
| amino acid sequence | variant protein? | variant protein? |
| 335 | No | |

[0893] The variant protein has the following domains, as determined by using InterPro. The domains are described in Table 15:

TABLE 15
InterPro domain(s)

| | Domain | | |
|---|---|---|---|
| InterPro ID | description | Analysis type | Position(s) on protein |
| IPR001393 | Calsequestrin | FPrintScan | 113-142, 154-183, |
| | | | 184-213, 20-43, 47-76, |
| | | | 77-106 |
| IPR001393 | Calsequestrin | HMMPfam | 2-203 |
| IPR001393 | Calsequestrin | ScanRegExp | 20-34 |

[0894] Variant protein N56180 P2 (SEQ ID NO:84) is encoded by the following transcript(s): N56180_T1 (SEQ ID NO:54). The coding portion of transcript N56180_T1 (SEQ ID NO:54) starts at position 242 and ends at position 961.

[0895] Variant protein N56180_P4 (SEQ ID NO:85) according to the present invention has an amino acid sequence; it is encoded by transcript(s) N56180_T3 (SEQ ID NO:55). An alignment is given to the known protein (Calsequestrin, cardiac muscle isoform precursor (SEQ ID NO: 83)). One or more alignments to one or more previously published protein sequences are given in the alignment table located on the attached CDROM. A brief description of the relationship of the variant protein according to the present invention to each such aligned protein is as follows:

[0896] Comparison report between N56180_P4 (SEQ ID NO:85) and CAQ2_HUMAN (SEQ ID NO:83):

[0897] 1. An isolated chimeric polypeptide encoding for N56180_P4 (SEQ ID NO:85), comprising a first amino acid sequence being at least 90% homologous to MKRTHLFIVGIYFLSSCRAEEGLNFPTYDGKDRVVSLSEKNFKQVLKKYDLLCLYYHEPVSSDKVT QKQFQLKEIVLE corresponding to amino acids 1-78 of CAQ2_HUMAN (SEQ ID NO:83), which also corresponds to amino acids 1-78 of N56180_P4 (SEQ ID NO:85), a second amino acid sequence being at least 70%, optionally at least 80%, preferably at least 85%, more preferably at least 90% and most preferably at least 95% homologous to a polypeptide having the sequence HWQISQWWLHFQTPREEGKMKLLELSESADGAAWKRWGGNSNTHRIQ (SEQ ID NO: 629) corresponding to amino acids 79-125 of N56180_P4 (SEQ ID NO:85), and a third amino acid sequence being at least 90% homologous to LVAQVLEHKAIGFVMVDAKKEAKLAKKLGFDEEGSLYILKGDRTIEFDGEFAADVLVEFLLDLIED PVEIISSKLEVQAFERIEDYIKLIGFFKSEDSEYYKAFEEAAEHFQPYIKFFATFDKGVAKKLSLKMN EVDFYEPFMDEPIAIPNKPYTEEELVEFVKEHQRPTLRRLRPEEMFETWEDDLNGIHIVAFAEKSDP DGYEFLEILKQVARDNTDNPDLSILWIDPDDFPLLVAYWEKTFKIDLFRPQIGVVNVTDADSVWME IPDDDDLPTAEELEDWIEDVLSGKINTEDDDEDDDDDDNSDEEDNDDSDDDDDE corresponding to amino acids 79-399 of CAQ2_HUMAN (SEQ ID NO:83), which also corresponds to amino acids 126-446 of N56180_P4 (SEQ ID NO:85), wherein said first amino acid sequence, second amino acid sequence and third amino acid sequence are contiguous and in a sequential order.

[0898] 2. An isolated polypeptide encoding for an edge portion of N56180_P4 (SEQ ID NO:85), comprising an amino acid sequence being at least 70%, optionally at least about 80%, preferably at least about 85%, more preferably at least about 90% and most preferably at least about 95% homologous to the sequence encoding for HWQISQWWLHFQTPREEGKMKLLELSESADGAAWKRWGGNSNTHRIQ (SEQ ID NO: 629), corresponding to N56180_P4 (SEQ ID NO:85).

[0899] The location of the variant protein was determined according to results from a number of different software programs and analyses, including analyses from SignalP and other specialized programs. The variant protein is believed to be located as follows with regard to the cell: secreted. The protein localization is believed to be secreted because both signal-peptide prediction programs predict that this protein has a signal peptide, and neither trans-membrane region prediction program predicts that this protein has a trans-membrane region.

[0900] The glycosylation sites of variant protein N56180_P4 (SEQ ID NO:85), as compared to the known protein Calsequestrin, cardiac muscle isoform precursor (SEQ ID NO: 83), are described in Table 16 (given according to their position(s) on the amino acid sequence in the first column; the second column indicates whether the glycosylation site is present in the variant protein; and the last column indicates whether the position is different on the variant protein).

TABLE 16
Glycosylation site(s)

| Position(s) on known | Present in | Position in |
|---|---|---|
| amino acid sequence | variant protein? | variant protein? |
| 335 | Yes | 382 |

[0901] The variant protein has the following domains, as determined by using InterPro. The domains are described in Table 17:

TABLE 17
InterPro domain(s)

| | | Analysis | |
|---|---|---|---|
| InterPro ID | Domain description | type | Position(s) on protein |
| IPR001393 | Calsequestrin | FPrintScan | 20-43, 47-76 |
| IPR001393 | Calsequestrin | HMMPfam | 124-428, 2-78 |
| IPR001393 | Calsequestrin | ScanRegExp | 20-34 |
| IPR001393 | Calsequestrin | ScanRegExp | 404-423 |

[0902] Variant protein N56180_P4 (SEQ ID NO:85) is encoded by transcript N56180_T3 (SEQ ID NO:55). The coding portion of transcript N56180_T3 (SEQ ID NO:55) starts at position 242 and ends at position 1579.

[0903] Variant protein N56180_P5 (SEQ ID NO:86) according to the present invention has an amino acid sequence; it is encoded by transcript(s) N56180_T4 (SEQ ID NO:56). An alignment is given to the known protein (Calsequestrin, cardiac muscle isoform precursor (SEQ ID NO: 83)). One or more alignments to one or more previously published protein sequences are given in the alignment table located on the attached CDROM. A brief description of the relationship of the variant protein according to the present invention to each such aligned protein is as follows:

[0904] Comparison report between N56180_P5 (SEQ ID NO:86) and CAQ2_HUMAN (SEQ ID NO:83):

[0905] 1. An isolated chimeric polypeptide encoding for N56180_P5 (SEQ ID NO:86), comprising a first amino acid sequence being at least 90% homologous to MKRTHLFIVGIYFLSSCRAEEGLNFPTYDGKDRVVSLSEKNFKQVLKKYDLLCLYYHEPVSSDKVT QKQFQLKEIVLELVAQVLEHKAIGFVMVDAKKEAKLAKKLGFDEEGSLYILKGDRTIEFDGEFAA DVLVEFLLD corresponding to amino acids 1-140 of CAQ2_HUMAN (SEQ ID NO:83), which also corresponds to amino acids 1-140 of N56180_P5 (SEQ ID NO:86), and a second amino acid sequence being at least 90% homologous to VAKKLSLKMNEVDFYEPFMDEPIAIPNKPYTEEELVEFVKEHQRPTLRRLRPEEMFETWEDDLNGI HIVAFAEKSDPDGYEFLEILKQVARDNTDNPDLSILWIDPDDFPLLVAYWEKTFKIDLFRPQIGVVN VTDADSVWMEIPDDDDLPTAEELEDWIEDVLSGKINTEDDDEDDDDDDNSDEEDNDDSDDDDDE corresponding to amino acids 203-399 of CAQ2_HUMAN (SEQ ID NO:83), which also corresponds to amino acids 141-337 of N56180_P5 (SEQ ID NO:86), wherein said first amino acid sequence and second amino acid sequence are contiguous and in a sequential order.

[0906] 2. An isolated chimeric polypeptide encoding for an edge portion of N56180_P5 (SEQ ID NO:86), comprising a polypeptide having a length “n”, wherein n is at least about 10 amino acids in length, optionally at least about 20 amino acids in length, preferably at least about 30 amino acids in length, more preferably at least about 40 amino acids in length and most preferably at least about 50 amino acids in length, wherein at least two amino acids comprise DV, having a structure as follows: a sequence starting from any of amino acid numbers 140−x to 140; and ending at any of amino acid numbers 141+((n−2)−x), in which x varies from 0 to n−2.

[0907] The location of the variant protein was determined according to results from a number of different software programs and analyses, including analyses from SignalP and other specialized programs. The variant protein is believed to be located as follows with regard to the cell: secreted. The protein localization is believed to be secreted because both signal-peptide prediction programs predict that this protein has a signal peptide, and neither trans-membrane region prediction program predicts that this protein has a trans-membrane region.

[0908] The glycosylation sites of variant protein N56180_P5 (SEQ ID NO:86), as compared to the known protein Calsequestrin, cardiac muscle isoform precursor (SEQ ID NO: 83), are described in Table 18 (given according to their position(s) on the amino acid sequence in the first column; the second column indicates whether the glycosylation site is present in the variant protein; and the last column indicates whether the position is different on the variant protein).

TABLE 18
Glycosylation site(s)

| Position(s) on known | Present in | Position in |
|---|---|---|
| amino acid sequence | variant protein? | variant protein? |
| 335 | Yes | 273 |

[0909] The variant protein has the following domains, as determined by using InterPro. The domains are described in Table 19:

TABLE 19
InterPro domain(s)

| | | Analysis | |
|---|---|---|---|
| InterPro ID | Domain description | type | Position(s) on protein |
| IPR001393 | Calsequestrin | FPrintScan | 113-142, 20-43, 47-76, |
| | | | 77-106 |
| IPR001393 | Calsequestrin | HMMPfam | 141-319, 2-140 |
| IPR001393 | Calsequestrin | ScanRegExp | 20-34 |
| IPR001393 | Calsequestrin | ScanRegExp | 295-314 |

[0910] Variant protein N56180_P5 (SEQ ID NO:86) is encoded by transcript N56180_T4 (SEQ ID NO:56). The coding portion of transcript N56180_T4 (SEQ ID NO:56) starts at position 242 and ends at position 1252.

[0911] Variant protein N56180_P6 (SEQ ID NO:87) according to the present invention has an amino acid sequence; it is encoded by transcript(s) N56180_T5 (SEQ ID NO:57). An alignment is given to the known protein (Calsequestrin, cardiac muscle isoform precursor (SEQ ID NO: 83)). One or more alignments to one or more previously published protein sequences are given in the alignment table located on the attached CDROM. A brief description of the relationship of the variant protein according to the present invention to each such aligned protein is as follows:

[0912] Comparison report between N56180_P6 (SEQ ID NO:87) and CAQ2_HUMAN (SEQ ID NO:83):

[0913] 1. An isolated chimeric polypeptide encoding for N56180_P6 (SEQ ID NO:87), comprising a first amino acid sequence being at least 70%, optionally at least 80%, preferably at least 85%, more preferably at least 90% and most preferably at least 95% homologous to a polypeptide having the sequence NETEAEQSYV (SEQ ID NO: 631) corresponding to amino acids 1-10 of N56180_P6 (SEQ ID NO:87), a second amino acid sequence being at least 90% homologous to RAEEGLNFPTYDGKDRVVSLSEKNFKQVLKKYDLLCLYYHEPVSSDKVTQKQFQLKEIVLELVAQ VLEHKAIGFVMVDAKKEAKLAKKL corresponding to amino acids 18-106 of CAQ2_HUMAN (SEQ ID NO:83), which also corresponds to amino acids 11-99 of N56180_P6 (SEQ ID NO:87), a third amino acid sequence bridging amino acid sequence comprising of D, and a fourth amino acid sequence being at least 90% homologous to YKAFEEAAEHFQPYIKFFATFDKGVAKKLSLKMNEVDFYEPFMDEPIAIPNKPYTEEELVEFVKEH QRPTLRRLRPEEMFETWEDDLNGIHIVAFAEKSDPDGYEFLEILKQVARDNTDNPDLSILWIDPDDF PLLVAYWEKTFKIDLFRPQIGVVNVTDADSVWMEIPDDDDLPTAEELEDWIEDVLSGKINTEDDDE DDDDDDNSDEEDNDDSDDDDDE corresponding to amino acids 179-399 of CAQ2_HUMAN (SEQ ID NO:83), which also corresponds to amino acids 101-321 of N56180_P6 (SEQ ID NO:87), wherein said first amino acid sequence, second amino acid sequence, third amino acid sequence and fourth amino acid sequence are contiguous and in a sequential order.

[0914] 2. An isolated polypeptide encoding for a head of N56180_P6 (SEQ ID NO:87), comprising a polypeptide being at least 70%, optionally at least about 80%, preferably at least about 85%, more preferably at least about 90% and most preferably at least about 95% homologous to the sequence NETEAEQSYV (SEQ ID NO: 631) of N56180_P6 (SEQ ID NO:87).

[0915] 3. An isolated polypeptide encoding for an edge portion of N56180_P6 (SEQ ID NO:87), comprising a polypeptide having a length “n”, wherein n is at least about 10 amino acids in length, optionally at least about 20 amino acids in length, preferably at least about 30 amino acids in length, more preferably at least about 40 amino acids in length and most preferably at least about 50 amino acids in length, wherein at least two amino acids comprise LDY having a structure as follows (numbering according to N56180_P6 (SEQ ID NO:87)): a sequence starting from any of amino acid numbers 99−x to 99; and ending at any of amino acid numbers 101+((n−2)−x), in which x varies from 0 to n−2.

[0916] The location of the variant protein was determined according to results from a number of different software programs and analyses, including analyses from SignalP and other specialized programs. The variant protein is believed to be located as follows with regard to the cell: unknown. The protein localization is believed to be unknown because of manual inspection of known protein localization and/or gene structure.

[0917] The glycosylation sites of variant protein N56180_P6 (SEQ ID NO:87), as compared to the known protein Calsequestrin, cardiac muscle isoform precursor (SEQ ID NO: 83), are described in Table 20 (given according to their position(s) on the amino acid sequence in the first column; the second column indicates whether the glycosylation site is present in the variant protein; and the last column indicates whether the position is different on the variant protein).

TABLE 20
Glycosylation site(s)

| Position(s) on known | | Position in |
|---|---|---|
| amino acid sequence | variant protein? | variant protein? |
| 335 | Yes | 257 |

[0918] The variant protein has the following domains, as determined by using InterPro. The domains are described in Table 21:

TABLE 21
InterPro domain(s)

| | | Analysis | |
|---|---|---|---|
| InterPro ID | Domain description | type | Position(s) on protein |
| IPR001393 | Calsequestrin | FPrintScan | 13-36, 40-69, 70-99 |
| IPR001393 | Calsequestrin | HMMPfam | 10-99, 101-303 |
| IPR001393 | Calsequestrin | ScanRegExp | 13-27 |
| IPR001393 | Calsequestrin | ScanRegExp | 279-298 |

[0919] Variant protein N56180_P6 (SEQ ID NO:87) is encoded by the following transcript(s): N56180_T5 (SEQ ID NO:57). The coding portion of transcript N56180_T5 (SEQ ID NO:57) starts at position 1 and ends at position 964.

[0920] Variant protein N56180_P7 (SEQ ID NO:88) according to the present invention has an amino acid sequence; it is encoded by transcript(s) N56180_T6 (SEQ ID NO:58). An alignment is given to the known protein (Calsequestrin, cardiac muscle isoform precursor (SEQ ID NO: 83)). One or more alignments to one or more previously published protein sequences are given in the alignment table located on the attached CDROM. A brief description of the relationship of the variant protein according to the present invention to each such aligned protein is as follows:

[0921] Comparison report between N56180_P7 (SEQ ID NO:88) and CAQ2_HUMAN (SEQ ID NO:83):

[0922] 1. An isolated chimeric polypeptide encoding for N56180_P7 (SEQ ID NO:88), comprising a first amino acid sequence being at least 70%, optionally at least 80%, preferably at least 85%, more preferably at least 90% and most preferably at least 95% homologous to a polypeptide having the sequence MSSWLSAGSPSSLSV (SEQ ID NO: 632) corresponding to amino acids 1-15 of N56180_P7 (SEQ ID NO:88), and a second amino acid sequence being at least 90% homologous to VAKKLSLKMNEVDFYEPFMDEPIAIPNKPYTEEELVEFVKEHQRPTLRRLRPEEMFETWEDDLNGI HIVAFAEKSDPDGYEFLEILKQVARDNTDNPDLSILWIDPDDFPLLVAYWEKTFKIDLFRPQIGVVN VTDADSVWMEIPDDDDLPTAEELEDWIEDVLSGKINTEDDDEDDDDDDNSDEEDNDDSDDDDDE corresponding to amino acids 203-399 of CAQ2_HUMAN (SEQ ID NO:83), which also corresponds to amino acids 16-212 of N56180_P7 (SEQ ID NO:88), wherein said first amino acid sequence and second amino acid sequence are contiguous and in a sequential order.

[0923] 2. An isolated polypeptide encoding for a head of N56180_P7 (SEQ ID NO:88), comprising a polypeptide being at least 70%, optionally at least about 80%, preferably at least about 85%, more preferably at least about 90% and most preferably at least about 95% homologous to the sequence MSSWLSAGSPSSLSV (SEQ ID NO: 632) of N56180_P7 (SEQ ID NO:88).

[0924] The location of the variant protein was determined according to results from a number of different software programs and analyses, including analyses from SignalP and other specialized programs. The variant protein is believed to be located as follows with regard to the cell: intracellularly. The protein localization is believed to be intracellularly because of manual inspection of known protein localization and/or gene structure.

[0925] The glycosylation sites of variant protein N56180_P7 (SEQ ID NO:88), as compared to the known protein Calsequestrin, cardiac muscle isoform precursor (SEQ ID NO: 83), are described in Table 22 (given according to their position(s) on the amino acid sequence in the first column; the second column indicates whether the glycosylation site is present in the variant protein; and the last column indicates whether the position is different on the variant protein).

TABLE 22
Glycosylation site(s)

| Position(s) on known | Present in | Position in |
|---|---|---|
| amino acid sequence | variant protein? | variant protein? |
| 335 | Yes | 148 |

[0926] The variant protein has the following domains, as determined by using InterPro. The domains are described in Table 23:

TABLE 23
InterPro domain(s)

| | Domain | | |
|---|---|---|---|
| InterPro ID | description | Analysis type | Position(s) on protein |
| IPR001393 | Calsequestrin | FPrintScan | 130-158, 161-189, 28-55, |
| | | | 61-88 |
| IPR001393 | Calsequestrin | HMMPfam | 16-194 |
| IPR001393 | Calsequestrin | ScanRegExp | 170-189 |

[0927] Variant protein N56180_P7 (SEQ ID NO:88) is encoded by the following transcript(s): N56180_T6 (SEQ ID NO:58). The coding portion of transcript N56180_T6 (SEQ ID NO:58) starts at position 71 and ends at position 706.

[0928] Variant protein N56180_P8 (SEQ ID NO:89) according to the present invention has an amino acid sequence; it is encoded by transcript(s) N56180_T7 (SEQ ID NO:59). An alignment is given to the known protein (Calsequestrin, cardiac muscle isoform precursor (SEQ ID NO: 83)). One or more alignments to one or more previously published protein sequences are given in the alignment table located on the attached CDROM. A brief description of the relationship of the variant protein according to the present invention to each such aligned protein is as follows:

[0929] Comparison report between N56180_P8 (SEQ ID NO:89) and CAQ2_HUMAN (SEQ ID NO:83):

[0930] 1. An isolated chimeric polypeptide encoding for N56180_P8 (SEQ ID NO:89), comprising a first amino acid sequence being at least 70%, optionally at least 80%, preferably at least 85%, more preferably at least 90% and most preferably at least 95% homologous to a polypeptide having the sequence MCRGYSTLLNPVS (SEQ ID NO: 633) corresponding to amino acids 1-13 of N56180_P8 (SEQ ID NO:89), and a second amino acid sequence being at least 90% homologous to DGYEFLEILKQVARDNTDNPDLSILWIDPDDFPLLVAYWEKTFKIDLFRPQIGVVNVTDADSVWME IPDDDDLPTAEELEDWIEDVLSGKINTEDDDEDDDDDDNSDEEDNDDSDDDDDE corresponding to amino acids 280-399 of CAQ2_HUMAN (SEQ ID NO:83), which also corresponds to amino acids 14-133 of N56180_P8 (SEQ ID NO:89), wherein said first amino acid sequence and second amino acid sequence are contiguous and in a sequential order.

[0931] 2. An isolated polypeptide encoding for a head of N56180_P8 (SEQ ID NO:89), comprising a polypeptide being at least 70%, optionally at least about 80%, preferably at least about 85%, more preferably at least about 90% and most preferably at least about 95% homologous to the sequence MCRGYSTLLNPVS (SEQ ID NO: 633) of N56180_P8 (SEQ ID NO:89).

[0932] The location of the variant protein was determined according to results from a number of different software programs and analyses, including analyses from SignalP and other specialized programs. The variant protein is believed to be located as follows with regard to the cell: intracellularly. The protein localization is believed to be intracellularly because of manual inspection of known protein localization and/or gene structure.

[0933] The glycosylation sites of variant protein N56180_P8 (SEQ ID NO:89), as compared to the known protein Calsequestrin, cardiac muscle isoform precursor (SEQ ID NO: 83), are described in Table 24 (given according to their position(s) on the amino acid sequence in the first column; the second column indicates whether the glycosylation site is present in the variant protein; and the last column indicates whether the position is different on the variant protein).

TABLE 24
Glycosylation site(s)

| Position(s) on known | Present in | Position in |
|---|---|---|
| amino acid sequence | variant protein? | variant protein? |
| 335 | Yes | 69 |

[0934] The variant protein has the following domains, as determined by using InterPro. The domains are described in Table 25:

TABLE 25
InterPro domain(s)

| | | Analysis | |
|---|---|---|---|
| InterPro ID | Domain description | type | Position(s) on protein |
| IPR001393 | Calsequestrin | FPrintScan | 51-79, 82-110 |
| IPR001393 | Calsequestrin | HMMPfam | 14-115 |
| IPR001393 | Calsequestrin | ScanRegExp | 91-110 |

[0935] Variant protein N56180_P8 (SEQ ID NO:89) is encoded by the following transcript(s): N56180_T7 (SEQ ID NO:59). The coding portion of transcript N56180_T7 (SEQ ID NO:59) starts at position 97 and ends at position 495.

[0936] Variant protein N56180_P9 (SEQ ID NO:90) according to the present invention has an amino acid sequence; it is encoded by transcript(s) N56180_T8 (SEQ ID NO:60). An alignment is given to the known protein (Calsequestrin, cardiac muscle isoform precursor (SEQ ID NO: 83)). One or more alignments to one or more previously published protein sequences are given in the alignment table located on the attached CDROM. A brief description of the relationship of the variant protein according to the present invention to each such aligned protein is as follows:

[0937] Comparison report between N56180_P9 (SEQ ID NO:90) and CAQ2_HUMAN (SEQ ID NO:83):

[0938] 1. An isolated chimeric polypeptide encoding for N56180_P9 (SEQ ID NO:90), comprising a first amino acid sequence being at least 90% homologous to MKRTHLFIVGIYFLSSCRAEEGLNFPTYDGKDRVVSLSEKNFKQVLKKYDLLCLYYHEPVSSDKVT QKQFQLKEIVLELVAQVLEHKAIGFVMVDAKKEAKLAKKLGFDEEGSLYILKGDRTIEFDGEFAA DVLVEFLLDLIEDPVEIISSKLEVQAFERIEDYIKLIGFFKSEDSEYYKAFEEAAEHFQPYIKFFATFD KGVAKKLSLKMNEVDFYEPFMDEPIAIPNKPYTEEELVEFVKEHQR corresponding to amino acids 1-246 of CAQ2_HUMAN (SEQ ID NO:83), which also corresponds to amino acids 1-246 of N56180_P9 (SEQ ID NO:90), and a second amino acid sequence being at least 70%, optionally at least 80%, preferably at least 85%, more preferably at least 90% and most preferably at least 95% homologous to a polypeptide having the sequence SRNWTQ (SEQ ID NO: 634) corresponding to amino acids 247-252 of N56180_P9 (SEQ ID NO:90), wherein said first amino acid sequence and second amino acid sequence are contiguous and in a sequential order.

[0939] 2. An isolated polypeptide encoding for a tail of N56180_P9 (SEQ ID NO:90), comprising a polypeptide being at least 70%, optionally at least about 80%, preferably at least about 85%, more preferably at least about 90% and most preferably at least about 95% homologous to the sequence SRNWTQ (SEQ ID NO: 634) in N56180_P9 (SEQ ID NO:90).

[0940] The location of the variant protein was determined according to results from a number of different software programs and analyses, including analyses from SignalP and other specialized programs. The variant protein is believed to be located as follows with regard to the cell: secreted. The protein localization is believed to be secreted because both signal-peptide prediction programs predict that this protein has a signal peptide, and neither trans-membrane region prediction program predicts that this protein has a trans-membrane region.

[0941] The glycosylation sites of variant protein N56180_P9 (SEQ ID NO:90), as compared to the known protein Calsequestrin, cardiac muscle isoform precursor (SEQ ID NO: 83), are described in Table 26 (given according to their position(s) on the amino acid sequence in the first column; the second column indicates whether the glycosylation site is present in the variant protein; and the last column indicates whether the position is different on the variant protein).

TABLE 26
Glycosylation site(s)

| Position(s) on known | Present | |
|---|---|---|
| amino acid sequence | in variant protein? | Position in variant protein? |
| 335 | No | |

[0942] The variant protein has the following domains, as determined by using InterPro. The domains are described in Table 27:

TABLE 27
InterPro domain(s)

| | Domain | | |
|---|---|---|---|
| InterPro ID | description | Analysis type | Position(s) on protein |
| IPR001393 | Calsequestrin | FPrintScan | 113-142, 154-183, |
| | | | 184-213, 20-43, |
| | | | 215-242, 47-76, 77-106 |
| IPR001393 | Calsequestrin | HMMPfam | 2-247 |
| IPR001393 | Calsequestrin | ScanRegExp | 20-34 |

[0943] Variant protein N56180_P9 (SEQ ID NO:90) is encoded by the following transcript(s): N56180_T8 (SEQ ID NO:60). The coding portion of transcript N56180_T8 (SEQ ID NO:60) starts at position 242 and ends at position 997.

[0944] Table 28 below describes the starting and ending position of N56180_node_{—}6 (SEQ ID NO:63) on each of the relevant transcripts. Experimental results for this segment are described below.

TABLE 28
Segment location on transcripts

| | Segment | Segment |
|---|---|---|
| Transcript name | starting position | ending position |
| N56180_T3 (SEQ ID NO: 55) | 476 | 616 |

[0945] Table 29 below describes the starting and ending position of N56180_node_{—}22 (SEQ ID NO:65) on each of the relevant transcripts. Experimental results for this segment are described below.

TABLE 29
Segment location on transcripts

| | Segment | Segment |
|---|---|---|
| Transcript name | starting position | ending position |
| N56180_T8 (SEQ ID NO: 60) | 979 | 1259 |

[0946] Table 30 below describes the starting and ending position of N56180_node_{—}33 (SEQ ID NO:81) on each of the relevant transcripts. Experimental results for this segment are described below.

TABLE 30
Segment location on transcripts

| | Segment | Segment |
|---|---|---|
| Transcript name | starting position | ending position |
| N56180_T1 (SEQ ID NO: 54) | 1351 | 1396 |
| N56180_T3 (SEQ ID NO: 55) | 1397 | 1442 |
| N56180_T4 (SEQ ID NO: 56) | 1070 | 1115 |
| N56180_T5 (SEQ ID NO: 57) | 782 | 827 |
| N56180_T6 (SEQ ID NO: 58) | 524 | 569 |
| N56180_T7 (SEQ ID NO: 59) | 313 | 358 |

[0947] Table 31 below describes the starting and ending position of N56180_node_{—}34 (SEQ ID NO:67) on each of the relevant transcripts. Experimental results for this segment are described below.

TABLE 31
Segment location on transcripts

| | Segment | Segment |
|---|---|---|
| Transcript name | starting position | ending position |
| N56180_T1 (SEQ ID NO: 54) | 1397 | 1644 |
| N56180_T3 (SEQ ID NO: 55) | 1443 | 1690 |
| N56180_T4 (SEQ ID NO: 56) | 1116 | 1363 |
| N56180_T5 (SEQ ID NO: 57) | 828 | 1075 |
| N56180_T6 (SEQ ID NO: 58) | 570 | 817 |
| N56180_T7 (SEQ ID NO: 59) | 359 | 606 |

[0948] Expression of Homo sapiens calsequestrin 2 (cardiac muscle) (CASQ2) N56180 transcripts which are detectable by amplicon as depicted in sequence name N56180 seg33-34 (SEQ ID NO:93) specifically in heart tissue:

[0949] Expression of Homo sapiens calsequestrin 2 (cardiac muscle) (CASQ2) transcripts detectable by or according to seg33-34, N56180 seg33-34 (SEQ ID NO:93) amplicon and primers N56180 seg33-34F (SEQ ID NO: 91) and N56180 seg33-34R (SEQ ID NO:92) was measured by real time PCR. In parallel the expression of four housekeeping genes—RPL19 (GenBank Accession No. NM_{—}000981 (SEQ ID NO:7); RPL19 amplicon (SEQ ID NO: 38)), TATA box (GenBank Accession No. NM_{—}003194 (SEQ ID NO:2); TATA amplicon (SEQ ID NO: 53)), Ubiquitin (GenBank Accession No. BC000449 (SEQ ID NO:9); amplicon—Ubiquitin-amplicon (SEQ ID NO:50)) and SDHA (GenBank Accession No. NM_{—}004168 (SEQ ID NO:4); amplicon—SDHA-amplicon (SEQ ID NO:29)), was measured similarly. For each RT sample, the expression of the above amplicons was normalized to the geometric mean of the quantities of the housekeeping genes. The normalized quantity of each RT sample was then divided by the median of the quantities of the heart samples (Sample Nos. 44-46, Table 7, above, “Tissue samples in normal panel”), to obtain a value of expression for each sample relative to median of the heart tissue.

[0950] FIG. 8 is a histogram showing relative expression of the above-indicated Homo sapiens calsequestrin 2 (cardiac muscle) (CASQ2) transcripts in heart tissue samples as opposed to other tissues.

[0951] As is evident from FIG. 8, the expression of Homo sapiens calsequestrin 2 (cardiac muscle) (CASQ2) transcripts detectable by the above amplicon in heart tissue samples was significantly higher than in most of the other samples (Sample Nos. 1-26, 28-43, 47-74 Table 7, “Tissue samples in normal panel”).

[0952] Primer pairs are also optionally and preferably encompassed within the present invention; for example, for the above experiment, the following primer pair was used as a non-limiting illustrative example only of a suitable primer pair: N56180 seg33-34F (SEQ ID NO: 91) forward primer; and N56180 seg33-34R (SEQ ID NO:92) reverse primer.

[0953] The present invention also preferably encompasses any amplicon obtained through the use of any suitable primer pair; for example, for the above experiment, the following amplicon was obtained as a non-limiting illustrative example only of a suitable amplicon: N56180 seg33-34 (SEQ ID NO:93).

[0954] Primers:

Forward primer N56180 seg33-34F (SEQ ID NO:91):
CTGGATTGAGGATGTGCTTTCTG
Reverse primer N56180 seg33-34R (SEQ ID NO:92):
TTTGGAGTTGGGCTATTCATCAT
Amplicon N56180 seg33-34 (SEQ ID NO:93):
CTGGATTGAGGATGTGCTTTCTGGAAAGATAAACACTGAAGATGATGATG
AAGATGATGATGATGATGATAATTCTGATGAAGAGGATAATGATGACAGT
GATGACGATGATGATGAATAGCCCAACTCCAAA

Expression of Calsequestrin, cardiac muscle isoform transcripts which are detectable by amplicon which are detectable by amplicon as depicted in sequence name N56180seg22 (SEQ ID NO: 96) specifically in heart tissue:

[0955] Expression of Calsequestrin, cardiac muscle isoform transcripts detectable by or according to seg 22 node, N56180 amplicon and N56180 seg22F (SEQ ID NO: 94) and N56180 seg22R (SEQ ID NO:95) primers was measured by real time PCR. In parallel the expression of four housekeeping genes—RPL19 (GenBank Accession No. NM_{—}000981 (SEQ ID NO:7); RPL19 amplicon (SEQ ID NO: 38)), TATA box (GenBank Accession No. NM_{—}003194 (SEQ ID NO:2); TATA amplicon (SEQ ID NO: 53)), Ubiquitin (GenBank Accession No. BC000449 (SEQ ID NO:9); amplicon—Ubiquitin-amplicon (SEQ ID NO:50)) and SDHA (GenBank Accession No. NM_{—}004168 (SEQ ID NO:4); amplicon—SDHA-amplicon (SEQ ID NO:29)), was measured similarly. For each RT sample, the expression of the above amplicons was normalized to the geometric mean of the quantities of the housekeeping genes. The normalized quantity of each RT sample was then divided by the median of the quantities of the heart samples (Sample Nos. 44, 45, 46, Table 7, above, “Tissue samples in normal panel”), to obtain a value of expression for each sample relative to median of the heart tissue.

[0956] FIG. 9 is a histogram showing specific expression of the above-indicated Calsequestrin, cardiac muscle isoform transcripts in heart tissue samples as opposed to other tissues. As is evident from FIG. 9, the expression of Calsequestrin, cardiac muscle isoform transcripts detectable by the above amplicon in heart tissue samples was significantly higher than in most of the other samples (non-heart tissue sample Nos. 1-21, 23-26, 28-43, 47-74 Table 7, “Tissue samples in normal panel”).

[0957] Primer pairs are also optionally and preferably encompassed within the present invention; for example, for the above experiment, the following primer pair was used as a non-limiting illustrative example only of a suitable primer pair: N56180 seg22F (SEQ ID NO: 94) forward primer; and N56180 seg 22R (SEQ ID NO:95) reverse primer.

[0958] The present invention also preferably encompasses any amplicon obtained through the use of any suitable primer pair; for example, for the above experiment, the following amplicon was obtained as a non-limiting illustrative example only of a suitable amplicon: N56180 seg22 (SEQ ID NO: 96).

N56180 seg22F (SEQ ID NO:94):
TTGATACCACTTAGTGTAGCTCCAGC
N56180 seg22R (SEQ ID NO:95) (SEQ ID NO:337):
TCAAGTAGTTGCTACAGACGCCA
N56180 seg22 (SEQ ID NO:96):
TTGATACCACTTAGTGTAGCTCCAGCATGGATCAGCAAACTTTTTCTGTA
AAGAACAAAATGGTAAATATTTCAGGTTCTGTGGGCCAGATGGCGTCTGT
AGCAACTACTTGA

Expression of Calsequestrin, cardiac muscle isoformtranscripts which are detectable by amplicon which are detectable by amplicon as depicted in sequence name N56180seg6 (SEQ ID NO: 99) specifically in heart tissue:

[0959] Expression of Calsequestrin, cardiac muscle isoform transcripts detectable by or according to seg6, N56180seg6 (SEQ ID NO: 99) amplicon and N56180 seg6F (SEQ ID NO:97) and N56180 seg6R (SEQ ID NO:98) primers was measured by real time PCR. In parallel the expression of four housekeeping genes—RPL19 (GenBank Accession No. NM_{—}000981 (SEQ ID NO:7); RPL19 amplicon (SEQ ID NO: 38)), TATA box (GenBank Accession No. NM_{—}003194 (SEQ ID NO:2); TATA amplicon (SEQ ID NO: 53)), Ubiquitin (GenBank Accession No. BC000449 (SEQ ID NO:9); amplicon—Ubiquitin-amplicon (SEQ ID NO:50)) and SDHA (GenBank Accession No. NM_{—}004168 (SEQ ID NO:4); amplicon—SDHA-amplicon (SEQ ID NO:29)) was measured similarly. For each RT sample, the expression of the above amplicons was normalized to the geometric mean of the quantities of the housekeeping genes. The normalized quantity of each RT sample was then divided by the median of the quantities of the heart samples (Sample Nos. 44, 45, 46, Table 7, above, “Tissue samples in normal panel”), to obtain a value of expression for each sample relative to median of the heart tissue.

[0960] FIG. 10 is a histogram showing specific expression of the above-indicated Calsequestrin, cardiac muscle isoform transcripts in heart tissue samples as opposed to other tissues. As is evident from FIG. 10, the expression of Calsequestrin, cardiac muscle isoform transcripts detectable by the above amplicon in heart tissue samples was significantly higher than in most other samples (non-heart tissue sample Nos. 1-21, 23-26, 28, 30-43 47-74 Table 7 above, “Tissue samples in normal panel”).

[0961] Primer pairs are also optionally and preferably encompassed within the present invention; for example, for the above experiment, the following primer pair was used as a non-limiting illustrative example only of a suitable primer pair: N56180 seg6F (SEQ ID NO:97) forward primer; and N56180 seg6R (SEQ ID NO:98) reverse primer.

[0962] The present invention also preferably encompasses any amplicon obtained through the use of any suitable primer pair; for example, for the above experiment, the following amplicon was obtained as a non-limiting illustrative example only of a suitable amplicon: N56180 seg6 (SEQ ID NO:99).

N56180 seg6F (SEQ ID NO:97):
ATATCCCAGTGGTGGTTGCATT
N56180 seg6R (SEQ ID NO:98):
CCCTCCCCAGCGTTTCC
N56180 seg6 (SEQ ID NO:99):
ATATCCCAGTGGTGGTTGCATTTCCAAACCCCAAGAGAGGAAGGCAAAAT
GAAGTTGCTGGAGTTGAGTGAATCTGCAGATGGAGCTGCGTGGAAACGCT
GGGGAGGG

### Description for Cluster S67314

[0963] Cluster S67314 features 4 transcript(s) and 8 segment(s) of interest, the names for which are given in Tables 32 and 33, respectively. The selected protein variants are given in table 34.

TABLE 32
Transcripts of interest
Transcript Name

S67314_PEA_1_T4 (SEQ ID NO: 100)
S67314_PEA_1_T5 (SEQ ID NO: 101)
S67314_PEA_1_T6 (SEQ ID NO: 102)
S67314_PEA_1_T7 (SEQ ID NO: 103)

TABLE 33
Segments of interest

| Segment Name | Corresponding Transcript(s) |
|---|---|
| S67314_PEA_1_node_0 | S67314_PEA_1_T4 (SEQ ID NO: 100), |
| (SEQ ID NO: 104) | S67314_PEA_1_T5 (SEQ ID NO: 101), |
| | S67314_PEA_1_T6 (SEQ ID NO: 102) |
| | and |
| | S67314_PEA_1_T7 (SEQ ID NO: 103) |
| S67314_PEA_1_node_4 | S67314_PEA_1_T4 (SEQ ID NO: 100), |
| (SEQ ID NO: 105) | S67314_PEA_1_T5 (SEQ ID NO: 101), |
| | S67314_PEA_1_T6 (SEQ ID NO: 102) |
| | and |
| | S67314_PEA_1_T7 (SEQ ID NO: 103) |
| S67314_PEA_1_node_11 | S67314_PEA_1_T4 (SEQ ID NO: 100) |
| (SEQ ID NO: 106) | |
| S67314_PEA_1_node_13 | S67314_PEA_1_T7 (SEQ ID NO: 103) |
| (SEQ ID NO: 107) | |
| S67314_PEA_1_node_15 | S67314_PEA_1_T5 (SEQ ID NO: 101) |
| (SEQ ID NO: 108) | |
| S67314_PEA_1_node_17 | S67314_PEA_1_T6 (SEQ ID NO: 102) |
| (SEQ ID NO: 109) | |
| S67314_PEA_1_node_3 | S67314_PEA_1_T7 (SEQ ID NO: 103) |
| (SEQ ID NO: 110) | |
| S67314_PEA_1_node_10 | S67314_PEA_1_T4 (SEQ ID NO: 100), |
| (SEQ ID NO: 111) | S67314_PEA_1_T5 (SEQ ID NO: 101), |
| | S67314_PEA_1_T6 (SEQ ID NO: 102) |
| | and |
| | S67314_PEA_1_T7 (SEQ ID NO: 103) |

TABLE 34
Proteins of interest

| Protein Name | Corresponding Transcript(s) |
|---|---|
| S67314_PEA_1_P4 | S67314_PEA_1_T4 (SEQ ID NO: 100) |
| (SEQ ID NO: 114) | |
| S67314_PEA_1_P5 | S67314_PEA_1_T5 (SEQ ID NO: 101) |
| (SEQ ID NO: 115) | |
| S67314_PEA_1_P6 | S67314_PEA_1_T6 (SEQ ID NO: 102) |
| (SEQ ID NO: 116) | |
| S67314_PEA_1_P7 | S67314_PEA_1_T7 (SEQ ID NO: 103) |
| (SEQ ID NO: 117) | |

[0964] These sequences are variants of the known protein Fatty acid-binding protein (SEQ ID NO:112), heart (SwissProt accession identifier FABH_HUMAN (SEQ ID NO:112); known also according to the synonyms H-FABP; Muscle fatty acid-binding protein; M-FABP; Mammary-derived growth inhibitor; MDGI), referred to herein as the previously known protein.

[0965] Protein Fatty acid-binding protein (SEQ ID NO:112), heart is known or believed to have the following function(s): FABP are thought to play a role in the intracellular transport of long-chain fatty acids and their acyl-CoA esters. Known polymorphisms for this sequence are as shown in Table 35.

TABLE 35
Amino acid mutations for Known Protein

| SNP position(s) on amino | |
|---|---|
| acid sequence | Comment |
| 1 | V -> A |
| 104 | L -> K |
| 124 | C -> S |
| 129 | E -> Q |

[0966] Protein Fatty acid-binding protein (SEQ ID NO:112), heart localization is believed to be Cytoplasmic.

[0967] The following GO Annotation(s) apply to the previously known protein. The following annotation(s) were found: negative control of cell proliferation, which are annotation(s) related to Biological Process; and lipid binding, which are annotation(s) related to Molecular Function.

[0968] The GO assignment relies on information from one or more of the SwissProt/TremBl Protein knowledgebase, available from <http://www.expasy.ch/sprot/>; or Locuslink, available from <http://www.ncbi.nlm.nih.gov/projects/LocusLink/>.

[0969] According to optional but preferred embodiments of the present invention, variants of this cluster according to the present invention (amino acid and/or nucleic acid sequences of S67314) may optionally have one or more of the following utilities, as described with regard to the Table 36 below. It should be noted that these utilities are optionally and preferably suitable for human and non-human animals as subjects, except where otherwise noted. The reasoning is described with regard to biological and/or physiological and/or other information about the known protein, but is given to demonstrate particular diagnostic utility for the variants according to the present invention.

TABLE 36
Utilities for Variants of S67314, related to Fatty acid-binding protein (SEQ ID NO: 112)
or FABP: FABPH_HUMAN

| | | |
|---|---|---|
| 1. horses with colic | Determination of I-FABP concentrations in | Nieto JE et al.,, Am J |
| | abdominal fluid and plasma may be useful | Vet Res. 2005 |
| | for predicting survival and the need for | Feb; 66(2): 223-32 |
| | abdominal surgical intervention in horses | |
| | with colic. Furthermore, serum creatine | |
| | kinase activity and color and protein | |
| | concentrations of abdominal fluid may be | |
| | useful in the diagnosis of intestinal ischemia | |
| 3. novel marker for the diagnosis | increased serum H-FABP levels in patients | Arimoto T et al., J |
| of congestive heart failure | with congestive heart failure | Card Fail. 2005 |
| | | Feb; 11(1): 56-60 |
| 4. biomarker of early acute | plasma levels of H-FABP were measured by | Chen L et al. J |
| myocardial infarction | sandwich ELISA in 93 patients with | Huazhong Univ Sci |
| | suspected AMI at admission within 6 h after | Technolog Med Sci. |
| | onset. These results revealed that H-FABP | 2004; 24(5): 449-51, |
| | possessed high diagnostic sensitivity and | 459 |
| | specificity for AMI in early stage, especially | |
| | within 3 h after onset of persistent angina | |
| | pectoris | |
| 5. detection of acute myocardial | abundant in heart and has low | Alhadi HA et al., |
| infarction (AMI) | concentrations in the blood and in tissues | QJM. 2004 |
| | outside the heart. It appears in the blood as | Apr; 97(4): 187-98 |
| | early as 1.5 h after onset of symptoms of | |
| | infarction, peaks around 6 h and returns to | |
| | baseline values in 24 h | |
| 6. diagnosis of acute myocardial | a simple one-step immunochromatography | Watanabe T et al., |
| infarction (AMI) | technique to detect H-FABP in whole blood | Clin Biochem. 2001 |
| | sample. Further studies are required to | Jun; 34(4): 257-63 |
| | identify the value of this point-of-care | |
| | testing (POCT) as a diagnostic marker for | |
| | AMI. | |
| 7. clinical validity of H-FABP as | H-FABP is a low molecular weight | Okamoto F et al., |
| a biochemical diagnostic marker | cytoplasmic protein and present abundantly | Clin Chem Lab Med. |
| in the early phase of acute | in the myocardium. When the myocardium | 2000 Mar; 38(3): 231-8 |
| myocardial infarction (AMI) | is injured, as in the case of myocardial | |
| | infarction, low molecular weight | |
| | cytoplasmic proteins including H-FABP are | |
| | released into the circulation and H-FABP is | |
| | detectable in a blood sample | |
| 8. plasma markers for detection of | H-FABP not only proves to be an excellent | Pelsers MM et al., |
| tissue injury | early marker for cardiac injury in acute | Clin Chim Acta. |
| | coronary syndromes, but also allows | 2005 Feb; 352(1-2): |
| | detection of minor myocardial injury in | 15-35 |
| | heart failure and unstable angina. | |
| 9. diagnosis of neurodegenerative | H-FABP might be a useful biomarker for | Steinacker P et al., |
| diseases | the differentiation between the dementias | Neurosci Lett. 2004 |
| | examined if levels in CSF and serum are | Nov 3; 370(1): 36-9 |
| | determined in parallel | |
| 10. gastric carcinoma | Immunohistochemistry with anti-H-FABP | Hashimoto T et al., |
| | antibody was performed in 669 gastric | Pathobiology. |
| | carcinomas and 60 tubular adenomas of the | 2004; 71(5): 267-73 |
| | stomach. conclusions: A subset of human | |
| | gastric carcinoma expresses H-FABP and its | |
| | expression is associated with FAS status, | |
| | disease progression, tumor aggressiveness | |
| | and poor patient survival. | |
| 11. chronic congestive heart | Concentration of the marker increase in the | Sato Y et al., Heart. |
| failure | absence of ischemic events in the subset of | 2004 |
| | patients with heart failure whose long term | Oct; 90(10): 1110-3 |
| | outcomes are most adverse | |
| 12. diagnosis of brain damage- | post-mortem cerebrospinal fluid samples | Lescuyer P et al., |
| related disorders including | were used as a model of massive brain insult | Proteomics. 2004 |
| cerebrovascular, dementia, and | to identify new markers potentially relevant | Aug; 4(8): 2234-41 |
| other neurodegenerative diseases. | for neurodegeneration. H-FABP, identified | |
| | in this study, is a potential marker of | |
| | Creutzfeldt-Jakob disease and stroke | |
| 13. Plasma marker for diagnosis | Patient studies indicate that B-FABP and H- | Pelsers MM et al., |
| of minor brain injury | FABP are more sensitive markers for minor | Clin Chem. 2004 |
| | brain injury than the currently used markers | Sep; 50(9): 1568-75. |
| | S100B and NSE | Epub 2004 Jun 24. |
| 14. evaluating the severity of | Serum concentrations of H-FABP were | Goto T et al., |
| congestive heart failure | determined in 48 patients with acute | Heart. 2003 |
| | deterioration of congestive heart failure, | Nov; 89(11): 1303-7 |
| | both before and after effective treatment. | |
| | The decreases in H-FABP concentrations | |
| | after treatment correlated with the decrease | |
| | in BNP concentrations | |
| 15. early diagnosis of stroke | H-FABP appears to be a valid serum | Zimmermann-Ivol |
| | biomarker for the early diagnosis of stroke | CG et al., Mol Cell |
| | | Proteomics. 2004 |
| | | Jan; 3(1): 66-72. Epub |
| | | 2003 Oct 26 |
| 16. diagnosis of Creutzfeldt-Jakob | H-FABP detection could be helpful as a | Guillaume E et al., |
| disease (CJD) | blood screening test for a pre-mortem | Proteomics. 2003 |
| | diagnosis of the disease and also to prevent | Aug; 3(8): 1495-9 |
| | the risk of iatrogenic transmission of CJD | |
| | through blood transfusion. | |
| 17. acute coronary syndrome | H-FABP can be an early diagnostic and | Nakata T. et al., |
| | prognostic biochemical marker, particularly | Cardiology. |
| | within the first 6 h from the onset of chest | 2003; 99(2): 96-104 |
| | symptoms, in patients with chest pain at an | |
| | emergency department. | |
| 19. marker of reperfusion after | (H-FABP) is a small, cytosolic protein | de Lemos JA et al., |
| thrombolytic therapy | found in high concentrations in the | Clin Chim Acta. |
| | myocardium. successful reperfusion can be | 2000 Aug; 298(1-2): |
| | detected within the first 60 min after | 85-97 |
| | thrombolysis with either H-FABP. | |
| 20. Marker for diagnosis of | H-FABP appears rapidly in plasma after | Hayashida N et al., |
| myocardial injury in patients | reperfusion and reaches its peak earlier than | Jpn Circ J. 2000 |
| undergoing cardiac surgery. | other available biochemical markers; it | Jan; 64(1): 18-22 |
| | appears also in urine and the levels | |
| | correlated with cardiac function. Plasma and | |
| | urinary H-FABP may be an early and | |
| | sensitive biochemical marker for the | |
| | diagnosis of myocardial injury in patients | |
| | undergoing cardiac surgery. | |
| 21. H-FABP levels in | expression of H-FABP was markedly | Pu L et al., Mol Cell |
| synaptosomal plasma membranes | reduced in aged mouse brain. | Biochem. 1999 |
| and synaptosomal cytosol may be | | Aug; 198(1-2): 69-78 |
| important factors modulating | | |
| neuronal differentiation and | | |
| function | | |
| 22. genetic markers to improve the | relationship between variation in the heart | Gerbens F. J Anim |
| meat quality of pigs by breeding | fatty acid-binding protein (H-FABP) gene | Sci. 1999 |
| | (FABP3) and intramuscular fat (IMF) | Apr; 77(4): 846-52 |
| | content. | |
| 23. Obesity in women | Increased capacity of intracellular fatty acid | Kempen KP et al., |
| | transport in skeletal muscle cells is involved | Eur J Clin Invest. |
| | in the physiological adaptations of fat | 1998 |
| | metabolism to energy restriction in obese | Dec; 28(12): 1030-7. |
| | female subjects. | |
| 24. Monoclonal antibodies to | FABP is abundantly present in heart and | Roos W et al., J |
| human heart fatty acid-binding | some skeletal muscles, was recently found | Immunol Methods. |
| protein. | to be a useful plasma marker for acute | 1995 Jun |
| | myocardial infarction | 14; 183(1): 149-53 |
| 25. Diabetes | expression of the H-FABP gene in aorta | Sakai K et al., Eur J |
| | may be specifically and dramatically | Biochem. 1995 Apr |
| | suppressed in streptozotocin-diabetic rats, | 1; 229(1): 201-6 |
| | and that this suppression appears to be | |
| | regulated by insulin. | |
| 26. Diagnostic value of heart | Among patients with MI admission FABP | Trifonov IR et al., |
| fatty-acid binding protein in early | compared with admission TnI more | Kardiologiia. |
| hospitalized patients with non ST | frequently exceeded diagnostic level (in 18 | 2003; 43(5): 4-8. |
| elevation acute coronary | vs 9 patients, respectively, p = 0.009). | |
| syndrome | Sensitivity and specificity of admission | |
| | levels of FABP and TnI for diagnosis of MI | |
| | were 58 and 85%, 29% and 100%, | |
| | respectively .FABP can be used as | |
| | additional diagnostic tool for myocardial | |
| | infarction (MI) detection in early admitted | |
| | patients with NSTEACS | |
| 27. Elevated levels of H-FABP | Circulating concentrations of cardiac | Ehrhardt S et al., |
| indicated myocardial impairment | proteins in complicated and uncomplicated | Trop Med Int Health. |
| in complicated but not in | Plasmodium falciparum malaria | 2004 |
| uncomplicated falciparum malaria | | Oct; 9(10): 1099-103 |
| 28. Diagnostic value of heart fatty | Myoglobin and hFABP provide little | Alansari SE et al., |
| acid binding protein and | clinical value when measured on admission | Ann Clin Biochem. |
| myoglobin in patients admitted | in patients presenting with chest pain. | 2004 Sep; 41(Pt |
| with chest pain | | 5): 391-6 |
| 29. H-FABP is decreased in | Aberrant expression of FABPs, especially | Cheon MS et al., J |
| brains of patients with Down | H-FABP may alter membrane fluidity and | Neural Transm |
| syndrome and Alzheimer's | signal transduction, and consequently could | Suppl. |
| disease; these may be measured | be involved in cellular dysfunction in | 2003; (67): 225-34 |
| for example in cerebrospinal fluid | neurodegenerative disorders. | |
| as well as other types of samples | | |
| (such as blood samples for | | |
| example). | | |
| 30. Pericardial fluid level of heart- | H-FABP-a sensitive and specific marker for | Tambara K. Int J |
| type cytoplasmic fatty acid- | the early diagnosis of acute myocardial | Cardiol. 2004 |
| binding protein (H-FABP) is an | infarction. Our hypothesis was that serum or | Feb; 93(2-3): 281-4. |
| indicator of severe myocardial | pericardial fluid levels of H-FABP can | |
| ischemia | reflect not only myocardial infarction but | |
| | also myocardial ischemia pericardial fluid | |
| | reflects pathophysiological conditions of | |
| | cardiomyocytes more sensitively than | |
| | circulating blood. | |
| 31. biomarkers may represent | pre-transplant concentration of these tissue | Gok MA et al., Clin |
| reliable pre-transplant indicators | injury biomarkers determined pre-transplant | Chim Acta. 2003 |
| of immediate kidney viability and | did not correlate with subsequent longer- | Dec; 338(1-2): 33-43 |
| short-term kidney function, they | term renal function | |
| do not predict the efficacy of renal | | |
| function in the longer term | | |
| 33. The value of F/M (ratio of | The concentration of hFABP (F), is | Furuhashi M et al., |
| FABP to myoglobin) after | significantly influenced by renal clearance | Nephron Clin Pract. |
| hemodialysis, but not the | and thus has limitations to its usefulness in | 2003; 93(2): C69-74 |
| concentration of hFABP itself, | patients with renal dysfunction. We | |
| might be a newly useful marker | evaluated whether the serum ratio of hFABP | |
| for estimation of cardiac damage | to myoglobin (F/M) might be a useful | |
| and volume overload in | marker for assessing cardiac damage in | |
| hemodialysis patients | hemodialysis patients | |
| 34. H-FABP, a marker of | Increased concentrations of H-FABP | Setsuta K et al. Circ |
| membrane damage, is related to | significantly correlated with the | J. 2004 |
| activated TNF and the Fas/FasL | concentrations of TNF- alpha and sFas | Aug; 68(8): 747-50 |
| system, which suggests a | independent of renal function | |
| pathophysiological role of | | |
| cardiomyocyte necrosis and/or | | |
| apoptosis in patients with | | |
| worsening heart failure. | | |
| 35. Assessment of coronary | FABP and myoglobin perform equally well | Klapper SR, et al., |
| reperfusion | as reperfusion markers, and successful | Heart. 2001 |
| | reperfusion can be assessed, with positive | Mar; 85(3): 278-85 |
| | predictive values of 87% and 88%, or even | |
| | 97% and 95% when infarct size is also taken | |
| | into account | |
| 36. Estimation of myocardial | FABP released from the heart after AMI is | Glatz JF et al., Br |
| infarct size | quantitatively recovered in plasma and that | Heart J. 1994 |
| | FABP is a useful biochemical plasma | Feb; 71(2): 135-40 |
| | marker for the estimation of myocardial | |
| | infarct size in humans. | |

[0970] According to other optional embodiments of the present invention, variants of this cluster according to the present invention (amino acid and/or nucleic acid sequences of S67314) may optionally have one or more of the following utilities, some of which are related to utilities described above. It should be noted that these utilities are optionally and preferably suitable for human and nonhuman animals as subjects, except where otherwise noted.

[0971] A non-limiting example of such a utility is the detection, diagnosis and/or determination of cardiac toxicity by an anti-cancer chemotherapeutic agent, particularly an anthracycline-type anticancer chemotherapeutic agent, including but not limited to adriamycin, daunorubicin hydrochloride, epirubicin hydrochloride, idarubicin hydrochloride, pirarubicin hydrochloride, or aclarubicin hydrochloride. The method comprises detecting a S67314 variant, for example a variant protein, protein fragment, peptide, polynucleotide, polynucleotide fragment and/or oligonucleotide as described herein, optionally and preferably in a serum sample. Such detection enables cardiotoxicity caused by the chemotherapeutic agent to be optionally and preferably detected sensitively at an early stage, which for example enables physicians to conduct medical procedures at an early stage of cardiotoxicity expression, such as change of pharmaceutical agents and the like.

[0972] Use of the known protein (FABPH or FABP) for detecting cardiotoxicity of anthracycline-like chemotherapeutic agents is described with regard to European Patent Application No. EP1491896, hereby incorporated by reference as if fully set forth herein.

[0973] For cancer treatment, prolonged administration of anthracycline-type anticancer chemotherapeutic agents is generally employed. While anthracycline-type anticancer chemotherapeutic agents have a wide range of anticancer spectrum, they are known to show cardiotoxicity as a common side effect due to myocardial injury action.

[0974] As a method of determining toxicity to the heart of an anthracycline-type anticancer chemotherapeutic agent, an electrocardiogram analysis, a blood biochemical test comprising measurement of Creatine Kinase (CK) in blood, an echocardiogram analysis and the like, which are general tests of cardiac function, are conventionally known and performed. However, since electrocardiogram analysis and echocardiogram analysis do not specifically detect cardiotoxicity of anthracycline-type anticancer chemotherapeutic agents, they do not have sufficient sensitivity to pick up the initial stage of the onset of toxicity of the agents, and can detect only the advanced cardiotoxicity. In addition, only a small amount of creatine kinase flows (escapes) into the blood due to the cardiotoxicity induced by anthracycline-type anticancer chemotherapeutic agents and creatine kinase requires a long time before escape, and therefore, a problem in clinical situation has existed in that cardiotoxicity of anthracycline-type anticancer chemotherapeutic agents is not precisely reflected.

[0975] This EP applications describes a method which involves drawing blood from the patients receiving such chemotherapy, comparing the level of Human H-FABP contained therein with that of human H-FABP contained in the blood of healthy volunteers, and further by comparing the value in patients receiving such therapy with a cut-off value for the determination of acute myocardial infarction, so as to determine the level of toxicity. According to preferred embodiments of the present invention, these levels are compared for S67314 variants so as to be able to distinguish between myocardial infarction and/or other acute cardiovascular event, and cardiotoxicity caused by such chemotherapy.

[0976] Optionally and preferably, the “determination of toxicity” includes but is not limited to determination of the presence or absence of expressed toxicity in the heart and determination of the level of toxicity when toxicity is present.

[0977] The method according to the present invention for detecting and/or diagnosing cardiotoxicity through detecting one or more S67314 variants may also optionally include one or more known methods for the detection of abnormality in the heart, such as electrocardiogram analysis, echocardiogram analysis and the like, more preferably in combination to determine toxicity. By combining a plurality test methods, the toxicity may optionally be determined more accurately and sensitively.

[0978] Detecting S67314 variants optionally and preferably includes quantitative measurement of a level of at least one variant in a tissue sample. Also, detecting optionally and preferably includes performing a plurality of measurements over time, for example to determine the level and progress of cardiotoxicity.

[0979] The determination results thus obtained are useful for a physician to decide, for a cancer patient under medication with an anthracycline-type anticancer chemotherapeutic agent, if (1) the administration of the same agent is to be continued, (2) the administration is to be stopped (the kind (type) of anticancer agent is changed) or (3) the dose is to be increased or decreased, and the like, and for a patient for whom administration of an anthracycline-type anticancer chemotherapeutic agent was once stopped due to the expression of cardiotoxicity, it is useful for determining if (4) administration of this agent is to be resumed.

[0980] As a specific non-limiting example, during the administration period of a chemotherapeutic agent such as adriamycin, for example, blood is taken from a patient at a frequency of at least once a month and the level of at least one S67314 variant is measured using the obtained blood as a sample, for example. The level of a plurality of variants may be measured, and/or the level of the known FABP may optionally be measured, so that this information may be combined for a diagnosis. Depending upon the level measured (and/or levels measured) it may be determined that the administration of the agent is to be stopped and a quick protective measure of cardiac muscle needs to be taken, or alternatively that administration of adriamycin can be continued.

[0981] As described above with regard to the Table of Utilities, FABP is known as a marker for transmissible spongiform encephalopathies (TSEs), especially CJD, also as described with regard to US Patent Application No. 20030157580, hereby incorporated by reference as if fully set forth herein. The S67314 variants according to the present invention may also optionally be used for diagnosing a subject having a TSE, preferably CJD. Optionally, such a diagnostic test may be combined with a test suitable for detecting acute myocardial infarction (AMI) as described herein, in order to confirm diagnosis with TSE as opposed to AMI.

[0982] Also as described above with regard to the Table of Utilities, FABP is known as a marker for stroke, optionally including early diagnosis of stroke, also as described with regard to US Patent Application No. 20030100038, hereby incorporated by reference as if fully set forth herein. The S67314 variants according to the present invention may also optionally be used for diagnosing a subject having had a stroke. Optionally, such a diagnostic test may be combined with a test suitable for detecting acute myocardial infarction (AMI) as described herein, in order to confirm diagnosis with TSE as opposed to AMI.

[0983] Cluster S67314 belongs to a family of proteins which are known to have functions related to the cardiovascular system and functions, including but not limited to, RBP1, FABP7, FABP4, RBP5, PMP2, RBP7, CRABP1, FABP5, RBP2, CRABP2, FABP2, FABP6, FABP1. These functions are described below; one or more variants of cluster S67314 may optionally have one or more diagnostic utilities related to these functions. FABP in cardiac injury surpass the performance of the standard early marker myoglobin. The liver only contains liver-type FABP (L-FABP), but co-expression of H-FABP and L-FABP occurs in the kidney. Similarly, intestinal-type FABP (I-FABP) and L-FABP are found in intestines, and brain-type FABP (B-FABP) and H-FABP occur in the brain. Preliminary but promising applications of these proteins have been demonstrated for liver rejection, viability selection of kidneys from non-heart-beating donors (NHBD), inflammatory and ischemic bowel disease, traumatic brain injury and in the prevention of muscle injury in trained athletes (Pelsers M M, Hermens W T, Glatz J F: “Fatty acid-binding proteins as plasma markers of tissue injury”. Clin Chim Acta. 2005 February; 352(1-2):15-35.).

[0984] Some family members have functions related to fatty acid uptake, oxidation and overall metabolic homeostasis (reviewed in Hertzel A V, Bernlohr D A.: The mammalian fatty acid-binding protein multigene family: molecular and genetic insights into function. Trends Endocrinol Metab. 2000 July; 11(5):175-80). The genetic factors of obesity requires consideration of the genetic basis of the underlying etiological factors including energy expenditure and substrate utilization. Basic proteins involved in energy expenditure (the sodium-potassium ATPase and the uncoupling protein) or substrate utilization (fatty acid binding protein) (Goran M I: Genetic influences on human energy expenditure and substrate utilization. Behav Genet. 1997 July; 27(4):389-99.). Members of the family of fatty acid binding proteins are able to regulate mammary gland differentiation locally, and fatty acid binding is not required for this activity (Kurtz A, Spitzer E, Zschiesche W, Wellstein A, Grosse R.: Local control of mammary gland differentiation: mammary-derived growth inhibitor and pleiotrophin. Biochem Soc Symp. 1998; 63:51-69.). Lack of such differentiation may for example lead to a disease state such as cancer for example.

[0985] With regard to other cardiac functions, it should be noted that cytoplasmic fatty acid-binding proteins (FABPs) are a family of proteins, expressed in a tissue-specific manner, that bind fatty acid ligands and are involved in shuttling fatty acids to cellular compartments, modulating intracellular lipid metabolism, and regulating gene expression. Several members of the FABP family have been shown to have important roles in regulating metabolism and have links to the development of insulin resistance and the metabolic syndrome. Recent studies demonstrate a role for intestinal FABP in the control of dietary fatty acid absorption and chylomicron secretion. Heart FABP is essential for normal myocardial fatty acid oxidation and modulates fatty acid uptake in skeletal muscle. Liver FABP is directly involved in fatty acid ligand signaling to the nucleus and interacts with peroxisome proliferator-activated receptors in hepatocytes. The adipocyte FABP (aP2) has been shown to affect insulin sensitivity, lipid metabolism and lipolysis, and has recently been shown to play an important role in atherosclerosis. Interestingly, expression of aP2 by the macrophage promotes atherogenesis, thus providing a link between insulin resistance, intracellular fatty acid disposition, and foam cell formation. The FABPs are promising targets for the treatment of dyslipidemia, insulin resistance, and atherosclerosis in humans (Cytoplasmic fatty acid-binding proteins: emerging roles in metabolism and atherosclerosis; Current Opinion in Lipidology. 13(2):141-147, April 2002; Boord, Jeffrey B. a; Fazio, Sergio a,b; Linton, MacRae F. a,c.). All of these functions may optionally be diagnostic utilities of one or more S67314 variants according to the present invention.

[0986] The gene PS1D is antisense tail to tail and may therefore be co-regulated with one or more S67314 variants according to the present invention, and hence may have one or more utilities of S67314 variants according to the present invention as described herein.

[0987] Table 37 below describes diagnostic utilities for the cluster S67314 that were found through microarrays, including the statistical significance thereof and a reference. One or more S67314 variants according to the present invention may optionally have one or more of these utilities.

TABLE 37

| | Statistical | |
|---|---|---|
| Diagnostic utility | significance | reference |
| Gene over expressed in Diffuse Large B- | 0.045 to 3.6E−5 | 1. Alizadeh AA, Staudt LM Nature (2000) |
| Cell Lymphoma (vs Benign Lymphoid, | | Distinct types of diffuse large B-cell |
| CLL and Follicular Lymphoma). | | lymphoma identified by gene expression |
| | | profiling |
| Gene over expressed in metastasis prostate | 0.012 | 1. Dhanasekaran SM, Chinnaiyan AM |
| cancer (vs. primary) | | Nature (2001) Delineation of prognostic |
| | | biomarkers in prostate cancer |
| Gene over expressed in T1, T2+ bladder | 0.049 | 1. Dyrskjot L, Orntoft TF Nat Genet |
| cancer (vs. Ta) | | (2003) Identifying distinct classes of |
| | | bladder carcinoma using microarrays |
| Gene over expressed in Squamous Cell | 5.2E−6 | 1. Garber ME, Petersen I PNAS (2001) |
| Lung Carcinoma (vs. normal lung) | | Diversity of gene expression in |
| | | adenocarcinoma of the lung. |
| Gene over expressed in severe emphysema | | GNF database |
| (vs. normal or mild emphysema lung) | | (http://www.ncbi.nlm.nih.gov/projects/geo/): |
| | | GDS737, probe ID: 214285_at. |

[0988] Other non-limiting exemplary utilities for S67314 variants according to the present invention are described in greater detail below and also with regard to the previous section on clinical utility.

[0989] The heart-selective diagnostic marker prediction engine provided the following results with regard to cluster S67314. Predictions were made for selective expression of transcripts of this contig in heart tissue, according to the previously described methods. The numbers on the y-axis of the first figure below refer to weighted expression of ESTs in each category, as “parts per million” (ratio of the expression of ESTs for a particular cluster to the expression of all ESTs in that category, according to parts per million).

[0990] Overall, the following results were obtained as shown with regard to the histogram in FIG. 11, concerning the number of heart-specific clones in libraries/sequences; as well as with regard to the histogram in FIGS. 12-13 concerning the actual expression of oligonucleotides in various tissues, including heart.

[0991] This cluster was found to be selectively expressed in heart for the following reasons: in a comparison of the ratio of expression of the cluster in heart specific ESTs to the overall expression of the cluster in non-heart ESTs, which was found to be 13.6; the ratio of expression of the cluster in heart specific ESTs to the overall expression of the cluster in muscle-specific ESTs which was found to be 2.6; and fisher exact test P-values were computed both for library and weighted clone counts to check that the counts are statistically significant, and were found to be 2.30E-25.

[0992] One particularly important measure of specificity of expression of a cluster in heart tissue is the previously described comparison of the ratio of expression of the cluster in heart as opposed to muscle. This cluster was found to be specifically expressed in heart as opposed to non-heart ESTs as described above. However, many proteins have been shown to be generally expressed at a higher level in both heart and muscle, which is less desirable. For this cluster, as described above, the ratio of expression of the cluster in heart specific ESTs to the overall expression of the cluster in muscle-specific ESTs which was found to be 13.6, which clearly supports specific expression in heart tissue.

[0993] As noted above, cluster S67314 features 4 transcript(s), which were listed in Table 32 above. These transcript(s) encode for protein(s) which are variant(s) of protein Fatty acid-binding protein (SEQ ID NO:112), heart. A description of each variant protein according to the present invention is now provided.

[0994] Variant protein S67314_PEA_{—}1_P4 (SEQ ID NO:114) according to the present invention has an amino acid sequence; it is encoded by transcript(s) S67314_PEA_{—}1_T4 (SEQ ID NO:100). An alignment is given to the known protein (Fatty acid-binding protein (SEQ ID NO:112), heart). One or more alignments to one or more previously published protein sequences are given in the alignment table located on the attached CDROM. A brief description of the relationship of the variant protein according to the present invention to each such aligned protein is as follows:

[0995] Comparison report between S67314_PEA_{—}1_P4 (SEQ ID NO:114) and FABH_HUMAN_V1 (SEQ ID NO:113):

[0996] 1. An isolated chimeric polypeptide encoding for S67314_PEA_{—}1_P4 (SEQ ID NO:114), comprising a first amino acid sequence being at least 90% homologous to MVDAFLGTWKLVDSKNFDDYMKSLGVGFATRQVASMTKPTTIIEKNGDILTLKTHSTFKNTEISFK LGVEFDETTADDRKVKSIVTLDGGKLVHLQKWDGQETTLVRELIDGKLIL corresponding to amino acids 1-116 of FABH_HUMAN_V1 (SEQ ID NO:113), which also corresponds to amino acids 1-116 of S67314_PEA_{—}1_P4 (SEQ ID NO:114), and a second amino acid sequence being at least 70%, optionally at least 80%, preferably at least 85%, more preferably at least 90% and most preferably at least 95% homologous to a polypeptide having the sequence VRWATLELYLIGYYYCSFSQACSKKPSPPLRAVEAGTREWLWVRVVSGGNFLCSGFGLTQAGTQI LPYRLHDCGQITFSKCNCKTGINNTNLVGLLGSL (SEQ ID NO: 635) corresponding to amino acids 117-215 of S67314_PEA_{—}1_P4 (SEQ ID NO:114), wherein said first amino acid sequence and second amino acid sequence are contiguous and in a sequential order.

[0997] 2. An isolated polypeptide encoding for a tail of S67314_PEA_{—}1_P4 (SEQ ID NO:114), comprising a polypeptide being at least 70%, optionally at least about 80%, preferably at least about 85%, more preferably at least about 90% and most preferably at least about 95% homologous to the sequence VRWATLELYLIGYYYCSFSQACSKKPSPPLRAVEAGTREWLWVRVVSGGNFLCSGFGLTQAGTQI LPYRLHDCGQITFSKCNCKTGINNTNLVGLLGSL (SEQ ID NO: 635) in S67314_PEA_{—}1_P4 (SEQ ID NO:114).

[0998] It should be noted that the known protein sequence (FABH_HUMAN (SEQ ID NO:112)) has one or more changes than the sequence named as being the amino acid sequence for FABH_HUMAN_Vi (SEQ ID NO:113). These changes were previously known to occur and are listed in table 38 below.

TABLE 38
Changes to FABH_HUMAN_V1 (SEQ ID NO: 113)

| SNP position(s) on amino | |
|---|---|
| acid sequence | Type of change |
| 1 | init_met |

[0999] The location of the variant protein was determined according to results from a number of different software programs and analyses, including analyses from SignalP and other specialized programs. The variant protein is believed to be located as follows with regard to the cell: intracellularly. The protein localization is believed to be intracellularly because of manual inspection of known protein localization and/or gene structure.

[1000] The variant protein has the following domains, as determined by using InterPro. The domains are described in Table 39:

TABLE 39
InterPro domain(s)

| | | | Position(s) on |
|---|---|---|---|
| InterPro ID | Domain description | Analysis type | protein |
| IPR000463 | Cytosolic fatty-acid | FPrintScan | 5-27, 64-80 |
| | binding protein | | |
| IPR000566 | Lipocalin-related | HMMPfam | 4-117 |
| | protein | | |
| | and Bos/Can/Equ | | |
| | allergen | | |
| IPR000463 | Cytosolic fatty-acid | ScanRegExp | 7-24 |
| | binding | | |
| | protein | | |

[1001] Variant protein S67314_PEA_{—}1_P4 (SEQ ID NO:114) is encoded by the following transcript(s): S67314_PEA_{—}1_T4 (SEQ ID NO:100). The coding portion of transcript S67314_PEA_{—}1_T4 (SEQ ID NO:100) starts at position 925 and ends at position 1569.

[1002] Variant protein S67314_PEA_{—}1_P5 (SEQ ID NO:115) according to the present invention has an amino acid sequence; it is encoded by transcript(s) S67314_PEA_{—}1_T5 (SEQ ID NO:101). An alignment is given to the known protein (Fatty acid-binding protein (SEQ ID NO:112), heart). One or more alignments to one or more previously published protein sequences are given in the alignment table located on the attached CDROM. A brief description of the relationship of the variant protein according to the present invention to each such aligned protein is as follows:

[1003] Comparison report between S67314_PEA_{—}1_P5 (SEQ ID NO:115) and FABH_HUMAN_V1 (SEQ ID NO:113):

[1004] 1. An isolated chimeric polypeptide encoding for S67314_PEA_{—}1_P5 (SEQ ID NO:115), comprising a first amino acid sequence being at least 90% homologous to MVDAFLGTWKLVDSKNFDDYMKSLGVGFATRQVASMTKPTTIIEKNGDILTLKTHSTFKNTEISFK LGVEFDETTADDRKVKSIVTLDGGKLVHLQKWDGQETTLVRELIDGKLIL corresponding to amino acids 1-116 of FABH_HUMAN_V1 (SEQ ID NO:113), which also corresponds to amino acids 1-116 of S67314_PEA_{—}1_P5 (SEQ ID NO:115), and a second amino acid sequence being at least 70%, optionally at least 80%, preferably at least 85%, more preferably at least 90% and most preferably at least 95% homologous to a polypeptide having the sequence DVLTAWPSIYRRQVKVLREDEITILPWHLQWSREKATKLLRPTLPSYNNHGWEELRVGKSIV (SEQ ID NO: 636) corresponding to amino acids 117-178 of S67314_PEA_{—}1_P5 (SEQ ID NO:115), wherein said first amino acid sequence and second amino acid sequence are contiguous and in a sequential order.

[1005] 2. An isolated polypeptide encoding for a tail of S67314_PEA_{—}1_P5 (SEQ ID NO:115), comprising a polypeptide being at least 70%, optionally at least about 80%, preferably at least about 85%, more preferably at least about 90% and most preferably at least about 95% homologous to the sequence DVLTAWPSIYRRQVKVLREDEITILPWHLQWSREKATKLLRPTLPSYNNHGWEELRVGKSIV (SEQ ID NO: 636) in S67314_PEA_{—}1_P5 (SEQ ID NO:115).

[1006] It should be noted that the known protein sequence (FABH_HUMAN (SEQ ID NO:112)) has one or more changes than the sequence named as being the amino acid sequence for FABH_HUMAN_V1 (SEQ ID NO:113). These changes were previously known to occur and are listed in table 40 below.

TABLE 40
Changes to FABH_HUMAN_V1 (SEQ ID NO:113)

| SNP position(s) on amino | |
|---|---|
| acid sequence | Type of change |
| 1 | init_met |

[1007] The location of the variant protein was determined according to results from a number of different software programs and analyses, including analyses from SignalP and other specialized programs. The variant protein is believed to be located as follows with regard to the cell: intracellularly. The protein localization is believed to be intracellularly because of manual inspection of known protein localization and/or gene structure.

[1008] The variant protein has the following domains, as determined by using InterPro. The domains are described in Table 41:

TABLE 41
InterPro domain(s)

| | | | Position(s) on |
|---|---|---|---|
| InterPro ID | Domain description | Analysis type | protein |
| IPR000463 | Cytosolic fatty-acid | FPrintScan | 5-27, 64-80 |
| | binding protein | | |
| IPR000566 | Lipocalin-related | HMMPfam | 4-115 |
| | protein | | |
| | and Bos/Can/Equ | | |
| | allergen | | |
| IPR000463 | Cytosolic fatty-acid | ScanRegExp | 7-24 |
| | binding | | |
| | protein | | |

[1009] Variant protein S67314_PEA_{—}1_P5 (SEQ ID NO:115) is encoded by the following transcript(s): S67314_PEA_{—}1_T5 (SEQ ID NO:101). The coding portion of transcript S67314_PEA_{—}1_T5 (SEQ ID NO:101) starts at position 925 and ends at position 1458.

[1010] Variant protein S67314_PEA_{—}1_P6 (SEQ ID NO:116) according to the present invention has an amino acid sequence; it is encoded by transcript(s) S67314_PEA_{—}1_T6 (SEQ ID NO:102). An alignment is given to the known protein (Fatty acid-binding protein (SEQ ID NO:112), heart) at the end of the application. One or more alignments to one or more previously published protein sequences are given in the alignment table located on the attached CDROM. A brief description of the relationship of the variant protein according to the present invention to each such aligned protein is as follows:

[1011] Comparison report between S67314_PEA_{—}1_P6 (SEQ ID NO:116) and FABH_HUMAN_V1 (SEQ ID NO:113):

[1012] 1. An isolated chimeric polypeptide encoding for S67314_PEA_{—}1_P6 (SEQ ID NO:116), comprising a first amino acid sequence being at least 90% homologous to MVDAFLGTWKLVDSKNFDDYMKSLGVGFATRQVASMTKPTTIIEKNGDILTLKTHSTFKNTEISFK LGVEFDETTADDRKVKSIVTLDGGKLVHLQKWDGQETTLVRELIDGKLIL corresponding to amino acids 1-116 of FABH_HUMAN_V1 (SEQ ID NO:113), which also corresponds to amino acids 1-116 of S67314_PEA_{—}1_P6 (SEQ ID NO:116), and a second amino acid sequence being at least 70%, optionally at least 80%, preferably at least 85%, more preferably at least 90% and most preferably at least 95% homologous to a polypeptide having the sequence MEKLQLRNVK (SEQ ID NO: 637) corresponding to amino acids 117-126 of S67314_PEA_{—}1_P6 (SEQ ID NO:116), wherein said first amino acid sequence and second amino acid sequence are contiguous and in a sequential order.

[1013] 2. An isolated polypeptide encoding for a tail of S67314_PEA_{—}1_P6 (SEQ ID NO:116), comprising a polypeptide being at least 70%, optionally at least about 80%, preferably at least about 85%, more preferably at least about 90% and most preferably at least about 95% homologous to the sequence MEKLQLRNVK (SEQ ID NO: 637) in S67314_PEA_{—}1_P6 (SEQ ID NO:116).

[1014] It should be noted that the known protein sequence (FABH_HUMAN (SEQ ID NO:112)) has one or more changes than the sequence named as being the amino acid sequence for FABH_HUMAN_V1 (SEQ ID NO:113). These changes were previously known to occur and are listed in table 42 below.

TABLE 42
Changes to FABH_HUMAN_V1 (SEQ ID NO:113)

| SNP position(s) on amino | |
|---|---|
| acid sequence | Type of change |
| 1 | init_met |

[1015] The location of the variant protein was determined according to results from a number of different software programs and analyses, including analyses from SignalP and other specialized programs. The variant protein is believed to be located as follows with regard to the cell: intracellularly. The protein localization is believed to be intracellularly because of manual inspection of known protein localization and/or gene structure.

[1016] The variant protein has the following domains, as determined by using InterPro. The domains are described in Table 43:

TABLE 43
InterPro domain(s)

| | | | Position(s) on |
|---|---|---|---|
| InterPro ID | Domain description | Analysis type | protein |
| IPR000463 | Cytosolic fatty-acid | FPrintScan | 5-27, 64-80 |
| | binding protein | | |
| IPR000566 | Lipocalin-related | HMMPfam | 4-119 |
| | protein | | |
| | and Bos/Can/Equ | | |
| | allergen | | |
| IPR000463 | Cytosolic fatty-acid | ScanRegExp | 7-24 |
| | binding | | |
| | protein | | |

[1017] Variant protein S67314_PEA_{—}1_P6 (SEQ ID NO:116) is encoded by the following transcript(s): S67314_PEA_{—}1_T6 (SEQ ID NO:102). The coding portion of transcript S67314_PEA_{—}1_T6 (SEQ ID NO:102) starts at position 925 and ends at position 1302.

[1018] Variant protein S67314_PEA_{—}1_P7 (SEQ ID NO:117) according to the present invention has an amino acid sequence; it is encoded by transcript(s) S67314_PEA_{—}1_T7 (SEQ ID NO:103). An alignment is given to the known protein (Fatty acid-binding protein (SEQ ID NO:112), heart) at the end of the application. One or more alignments to one or more previously published protein sequences are given in the alignment table located on the attached CDROM. A brief description of the relationship of the variant protein according to the present invention to each such aligned protein is as follows:

[1019] Comparison report between S67314_PEA_{—}1_P7 (SEQ ID NO:117) and FABH_HUMAN_V1 (SEQ ID NO:113):

[1020] 1. An isolated chimeric polypeptide encoding for S67314_PEA_{—}1_P7 (SEQ ID NO:117), comprising a first amino acid sequence being at least 90% homologous to MVDAFLGTWKLVDSKNFDDYMKSL corresponding to amino acids 1-24 of FABH_HUMAN_V1 (SEQ ID NO:113), which also corresponds to amino acids 1-24 of S67314_PEA_{—}1_P7 (SEQ ID NO:117), a second amino acid sequence being at least 70%, optionally at least 80%, preferably at least 85%, more preferably at least 90% and most preferably at least 95% homologous to a polypeptide having the sequence AHILITFPLPS (SEQ ID NO: 638) corresponding to amino acids 25-35 of S67314_PEA_{—}1_P7 (SEQ ID NO:117), and a third amino acid sequence being at least 90% homologous to GVGFATRQVASMTKPTTIIEKNGDILTLKTHSTFKNTEISFKLGVEFDETTADDRKVKSIVTLDGGK LVHLQKWDGQETTLVRELIDGKLILTLTHGTAVCTRTYEKEA corresponding to amino acids 25-133 of FABH_HUMAN_V1 (SEQ ID NO:113), which also corresponds to amino acids 36-144 of S67314_PEA_{—}1_P7 (SEQ ID NO:117), wherein said first amino acid sequence, second amino acid sequence and third amino acid sequence are contiguous and in a sequential order.

[1021] 2. An isolated polypeptide encoding for an edge portion of S67314_PEA_{—}1_P7 (SEQ ID NO:117), comprising an amino acid sequence being at least 70%, optionally at least about 80%, preferably at least about 85%, more preferably at least about 90% and most preferably at least about 95% homologous to the sequence encoding for AHILITFPLPS (SEQ ID NO: 638), corresponding to S67314_PEA_{—}1_P7 (SEQ ID NO:117).

[1022] It should be noted that the known protein sequence (FABH_HUMAN (SEQ ID NO:112)) has one or more changes than the sequence named as being the amino acid sequence for FABH_HUMAN_V1 (SEQ ID NO:113). These changes were previously known to occur and are listed in table 44 below.

TABLE 44
Changes to FABH_HUMAN_V1 (SEQ ID NO:113)

| SNP position(s) on amino | |
|---|---|
| acid sequence | Type of change |
| 1 | init_met |

[1023] The location of the variant protein was determined according to results from a number of different software programs and analyses, including analyses from SignalP and other specialized programs. The variant protein is believed to be located as follows with regard to the cell: intracellularly. The protein localization is believed to be intracellularly because of manual inspection of known protein localization and/or gene structure.

[1024] The variant protein has the following domains, as determined by using InterPro. The domains are described in Table 45:

TABLE 45
InterPro domain(s)

| | | | Position(s) on |
|---|---|---|---|
| InterPro ID | Domain description | Analysis type | protein |
| IPR000463 | Cytosolic fatty-acid | FPrintScan | 122-142, 5-27 |
| | binding | | |
| | protein | | |
| IPR000566 | Lipocalin-related | HMMPfam | 4-143 |
| | protein | | |
| | and Bos/Can/Equ | | |
| | allergen | | |
| IPR000463 | Cytosolic fatty-acid | ScanRegExp | 7-24 |
| | binding | | |
| | protein | | |

[1025] Variant protein S67314_PEA_{—}1_P7 (SEQ ID NO:117) is encoded by the following transcript(s): S67314_PEA_{—}1_T7 (SEQ ID NO:103). The coding portion of transcript S67314_PEA_{—}1_T7 (SEQ ID NO:103) starts at position 925 and ends at position 1356.

[1026] Table 46 below describes the starting and ending position of S67314_PEA_{—}1_node_{—}4 (SEQ ID NO:105) on each of the relevant transcripts. Experimental results of this segment are described below.

TABLE 46
Segment location on transcripts

| | Segment | Segment |
|---|---|---|
| | starting | ending |
| Transcript name | position | position |
| S67314_PEA_1_T4 (SEQ ID NO:100) | 998 | 1170 |
| S67314_PEA_1_T5 (SEQ ID NO:101) | 998 | 1170 |
| S67314_PEA_1_T6 (SEQ ID NO:102) | 998 | 1170 |
| S67314_PEA_1_T7 (SEQ ID NO:103) | 1031 | 1203 |

[1027] Table 47 below describes the starting and ending position of S67314_PEA_{—}1_node_{—}11 (SEQ ID NO:106) on each of the relevant transcripts. Experimental results for this segment are described below.

TABLE 47
Segment location on transcripts

| | Segment | Segment |
|---|---|---|
| | starting | ending |
| Transcript name | position | position |
| S67314_PEA_1_T4 (SEQ ID NO:100) | 1273 | 2110 |

[1028] Table 48 below describes the starting and ending position of S67314_PEA_{—}1_node_{—}15 (SEQ ID NO:108) on each of the relevant transcripts. Experimental results for this segment are described below.

TABLE 48
Segment location on transcripts

| | Segment | Segment |
|---|---|---|
| | starting | ending |
| Transcript name | position | position |
| S67314_PEA_1_T5 (SEQ ID NO:101) | 1273 | 1733 |

Expression of FABH_HUMAN (SEQ ID NO:112) Fatty acid-binding protein (SEQ ID NO:112) transcripts which are detectable by amplicon as depicted in sequence name S67314seg11 (SEQ ID NO: 120) specifically in heart tissue:

[1029] Expression of FABH_HUMAN (SEQ ID NO:112) Fatty acid-binding protein (SEQ ID NO:112) transcripts detectable by or according to seg11, S67314 seg11 (SEQ ID NO:120) amplicon and S67314 seg11F (SEQ ID NO:118) and S67314 seg11R (SEQ ID NO:119) primers was measured by real time PCR. In parallel the expression of four housekeeping genes—RPL19 (GenBank Accession No. NM_{—}000981 (SEQ ID NO:7); RPL19 amplicon (SEQ ID NO: 38)), TATA box (GenBank Accession No. NM_{—}003194 (SEQ ID NO:2); TATA amplicon (SEQ ID NO: 53)), Ubiquitin (GenBank Accession No. BC000449 (SEQ ID NO:9); amplicon—Ubiquitin-amplicon (SEQ ID NO:50)) and SDHA (GenBank Accession No. NM_{—}004168 (SEQ ID NO:4); amplicon—SDHA-amplicon (SEQ ID NO:29)), was measured similarly. For each RT sample, the expression of the above amplicon was normalized to the geometric mean of the quantities of the housekeeping genes. The normalized quantity of each RT sample was then divided by the median of the quantities of the heart samples (Sample Nos. 44, 45, 46, Table 7, above, “Tissue samples in normal panel”), to obtain a value of expression for each sample relative to median of the heart tissue.

[1030] FIG. 14 is a histogram showing specific expression of the above-indicated FABH_HUMAN (SEQ ID NO:112) Fatty acid-binding protein (SEQ ID NO:112) transcripts in heart tissue samples as opposed to other tissues.

[1031] As is evident from FIG. 14, the expression of FABH_HUMAN (SEQ ID NO:112) Fatty acid-binding protein (SEQ ID NO:112) transcripts detectable by the above amplicon in normal heart tissue samples was significantly higher than in the other samples (Sample Nos. 1-43, 47-74, Table 7, “Tissue samples in normal panel”).

[1032] Primer pairs are also optionally and preferably encompassed within the present invention; for example, for the above experiment, the following primer pair was used as a non-limiting illustrative example only of a suitable primer pair: S67314 seg11F (SEQ ID NO:118) forward primer; and S67314 seg11R (SEQ ID NO:119) reverse primer.

[1033] The present invention also preferably encompasses any amplicon obtained through the use of any suitable primer pair; for example, for the above experiment, the following amplicon was obtained as a non-limiting illustrative example only of a suitable amplicon: S67314 seg11 (SEQ ID NO:120).

S67314 seg11F (SEQ ID NO:118):
TCCCCTGAGAGCTGTAGAAGCT
S67314 seg11R (SEQ ID NO:119):
CGGCCTGTGTGAGTCCAAA
S67314 seg11 (SEQ ID NO:120):
TCCCCTGAGAGCTGTAGAAGCTGGGACAAGAGAGTGGTTGTGGGTCAGGG
TGGTATCAGGTGGGAATTTTCTGTGTAGTGGCTTTGGACTCACACAGGCC
G

Expression of FABH_HUMAN (SEQ ID NO:112) Fatty acid-binding protein (SEQ ID NO:112) S67314 transcripts, which are detectable by amplicon as depicted in sequence name S67314 seg15 (SEQ ID NO:123) specifically in heart tissue:

[1034] Expression of FABH_HUMAN (SEQ ID NO:112) Fatty acid-binding protein (SEQ ID NO:112) transcripts detectable by or according to segment 15, S67314 seg15 (SEQ ID NO:123) amplicon and S67314 seg15F (SEQ ID NO: 121) and S67314 seg15R (SEQ ID NO: 122) primers was measured by real time PCR. In parallel the expression of four housekeeping genes—RPL19 (GenBank Accession No. NM_{—}000981 (SEQ ID NO:7); RPL19 amplicon (SEQ ID NO: 38)), TATA box (GenBank Accession No. NM_{—}003194 (SEQ ID NO:2); TATA amplicon (SEQ ID NO: 53)), Ubiquitin (GenBank Accession No. BC000449 (SEQ ID NO:9); amplicon—Ubiquitin-amplicon (SEQ ID NO:50)) and SDHA (GenBank Accession No. NM_{—}004168 (SEQ ID NO:4); amplicon—SDHA-amplicon (SEQ ID NO:29)), was measured similarly. For each RT sample, the expression of the above amplicon was normalized to the geometric mean of the quantities of the housekeeping genes. The normalized quantity of each RT sample was then divided by the median of the quantities of the heart samples (Sample Nos. 44-46, Table 7, above, “Tissue samples in normal panel”), to obtain a value of expression for each sample relative to median of the heart tissue.

[1035] FIG. 15 is a histogram showing specific expression of the above-indicated FABH_HUMAN (SEQ ID NO:112) Fatty acid-binding protein (SEQ ID NO:112) transcripts in heart tissue samples as opposed to other tissues.

As is evident from FIG. 15, the expression of FABH_HUMAN (SEQ ID NO:112) Fatty acid-binding protein (SEQ ID NO:112) transcripts detectable by the above amplicon in normal heart tissue samples was significantly higher than in most other samples (Sample Nos. 1-9, 11-21, 23-26, 28-43, 47-74 Table 7, “Tissue samples in normal panel”).

[1036] Primer pairs are also optionally and preferably encompassed within the present invention; for example, for the above experiment, the following primer pair was used as a non-limiting illustrative example only of a suitable primer pair: S67314 seg15F (SEQ ID NO: 121) forward primer; and S67314 seg15R (SEQ ID NO: 122) reverse primer.

[1037] The present invention also preferably encompasses any amplicon obtained through the use of any suitable primer pair; for example, for the above experiment, the following amplicon was obtained as a non-limiting illustrative example only of a suitable amplicon: S67314 seg15 (SEQ ID NO:123).

Forward primer - S67314 seg15-F (SEQ ID NO:121):
TTCCTTGGCATCTCCAATGG
Reverse primer - S67314 seg15-R (SEQ ID NO:122):
GCCAACTCTCAGCTCCTCCC
Amplicon (SEQ ID NO:123):
TTCCTTGGCATCTCCAATGGAGTAGAGAGAAGGCAACAAAGCTTCTCAGA
CCCACATTACCGAGCTATAACAACCATGGCTGGGAGGAGCTGAGAGTTGG
C

Expression of FABH_HUMAN (SEQ ID NO:112) Fatty acid-binding protein (SEQ ID NO:112) S67314 transcripts which are detectable by amplicon as depicted in sequence name S67314seg4 (SEQ ID NO: 126) specifically in heart tissue:

[1038] Expression of FABH_HUMAN (SEQ ID NO:112) Fatty acid-binding protein (SEQ ID NO:112) S67314 transcripts detectable by or according to seg4 node, S67314 seg4 (SEQ ID NO: 126) amplicon and primers S67314seg4F (SEQ ID NO: 124) and S67314seg4R (SEQ ID NO: 125) was measured by real time PCR. In parallel the expression of four housekeeping genes—RPL19 (GenBank Accession No. NM_{—}000981 (SEQ ID NO:7); RPL19 amplicon (SEQ ID NO: 38)), TATA box (GenBank Accession No. NM_{—}003194 (SEQ ID NO:2); TATA amplicon (SEQ ID NO: 53)), Ubiquitin (GenBank Accession No. BC000449 (SEQ ID NO:9); amplicon—Ubiquitin-amplicon (SEQ ID NO:50)) and SDHA (GenBank Accession No. NM_{—}004168 (SEQ ID NO:4); amplicon—SDHA-amplicon (SEQ ID NO:29)), was measured similarly. For each RT sample, the expression of the above amplicons was normalized to the geometric mean of the quantities of the housekeeping genes. The normalized quantity of each RT sample was then divided by the median of the quantities of the heart samples (Sample Nos. 44-46, Table 7, above, “Tissue samples in normal panel”), to obtain a value of relative expression for each sample relative to median of the heart samples.

[1039] FIG. 16 is a histogram showing relative expression of the above-indicated FABH_HUMAN (SEQ ID NO:112) Fatty acid-binding protein (SEQ ID NO:112) transcripts in heart tissue samples as opposed to other tissues.

As is evident from FIG. 16, the expression of FABH_HUMAN (SEQ ID NO:112) Fatty acid-binding protein (SEQ ID NO:112) transcripts detectable by the above amplicon in normal heart tissue samples was significantly higher than in the other samples (Sample Nos. 44-46 Table 7, “Tissue samples in normal panel”).

[1040] Primer pairs are also optionally and preferably encompassed within the present invention; for example, for the above experiment, the following primer pair was used as a non-limiting illustrative example only of a suitable primer pair: S67314seg4F (SEQ ID NO: 124) forward primer; and S67314seg4R (SEQ ID NO: 125) reverse primer.

[1041] The present invention also preferably encompasses any amplicon obtained through the use of any suitable primer pair; for example, for the above experiment, the following amplicon was obtained as a non-limiting illustrative example only of a suitable amplicon: S67314seg4 (SEQ ID NO: 126).

[1042] Primers:

Forward primer S67314 seg4F (SEQ ID NO:124):
CCAAGCCTACCACAATCATCG
Reverse primer S67314 seg4R (SEQ ID NO:125):
CTCCACCCCAACTTAAAGCT
Amplicon S67314 seg4 (SEQ ID NO:126):
CCAAGCCTACCACAATCATCGAAAAGAATGGGGACATTCTCACCCTAAAA
ACACACAGCACCTTCAAGAACACAGAGATCAGCTTTAAGTTGGGGGTGGA
G

### Description for Cluster HUMNATPEP

[1043] Cluster HUMNATPEP features 4 transcript(s) and 7 segment(s) of interest, the names for which are given in Tables 49 and 50, respectively. The selected protein variants are given in table 51.

TABLE 49
Transcripts of interest

| Transcript Name | |
|---|---|
| HUMNATPEP_PEA_1_T1 | (SEQ ID NO:127) |
| HUMNATPEP_PEA_1_T2 | (SEQ ID NO:128) |
| HUMNATPEP_PEA_1_T3 | (SEQ ID NO:129) |
| HUMNATPEP_PEA_1_T4 | (SEQ ID NO:130) |

TABLE 50
Segments of interest

Segment Name

| | |
|---|---|
| HUMNATPEP_PEA_1_node 0 (SEQ ID NO:131) | HUMNATPEP_PEA_1_T1 (SEQ ID |
| | NO:127), HUMNATPEP_PEA_1_T2 (SEQ |
| | ID NO:128), HUMNATPEP_PEA_1_T3 |
| | (SEQ ID NO:129) and |
| | HUMNATPEP_PEA_1_T4 (SEQ ID |
| | NO:130) |
| HUMNATPEP_PEA_1_node 1 (SEQ ID NO:132) | HUMNATPEP_PEA_1_T1 (SEQ ID |
| | NO:127), HUMNATPEP_PEA_1_T2 (SEQ |
| | ID NO:128) and HUMNATPEP_PEA_1_T3 |
| | (SEQ ID NO:129) |
| HUMNATPEP_PEA_1_node 2 (SEQ ID NO:133) | HUMNATPEP_PEA_1_T2 (SEQ ID |
| | NO:128) and HUMNATPEP_PEA_1_T3 |
| | (SEQ ID NO:129) |
| HUMNATPEP_PEA_1_node 3 (SEQ ID NO:134) | HUMNATPEP_PEA_1_T1 (SEQ ID |
| | NO:127), HUMNATPEP_PEA_1_T2 (SEQ |
| | ID NO:128) and HUMNATPEP_PEA_1_T3 |
| | (SEQ ID NO:129) |
| HUMNATPEP_PEA_1_node 4 (SEQ ID NO:135) | HUMNATPEP_PEA_1_T1 (SEQ ID |
| | NO:127), HUMNATPEP_PEA_1_T2 (SEQ |
| | ID NO:128), HUMNATPEP_PEA_1_T3 |
| | (SEQ ID NO:129) and |
| | HUMNATPEP_PEA_1_T4 (SEQ ID |
| | NO:130) |
| HUMNATPEP_PEA_1_node 5 (SEQ ID NO:136) | HUMNATPEP_PEA_1_T1 (SEQ ID |
| | NO:127) and HUMNATPEP_PEA_1_T3 |
| | (SEQ ID NO:129) |
| HUMNATPEP_PEA_1_node 6 (SEQ ID NO:137) | HUMNATPEP_PEA_1_T1 (SEQ ID |
| | NO:127), HUMNATPEP_PEA_1_T2 (SEQ |
| | ID NO:128), HUMNATPEP_PEA_1_T3 |
| | (SEQ ID NO:129) and |
| | HUMNATPEP_PEA_1_T4 (SEQ ID |
| | NO:130) |

TABLE 51
Proteins of interest

| Protein Name | Corresponding Transcript(s) |
|---|---|
| HUMNATPEP_PEA_1_P2 (SEQ ID NO:139) | HUMNATPEP_PEA_1_T1 (SEQ ID NO:127) |
| HUMNATPEP_PEA_1_P3 (SEQ ID NO:140) | HUMNATPEP_PEA_1_T2 (SEQ ID NO:128) |
| | HUMNATPEP_PEA_1_T3 (SEQ ID NO:129) |
| HUMNATPEP_PEA_1_P7 (SEQ ID NO:141) | HUMNATPEP_PEA_1_T4 (SEQ ID NO:130) |

[1044] These sequences are variants of the known protein Natriuretic peptides B precursor [Contains: Gamma-brain natriuretic peptide; Brain natriuretic peptide 32 (BNP-32)] (SwissProt accession identifier ANFB_HUMAN (SEQ ID NO:138)), referred to herein as the previously known protein.

[1045] Protein Natriuretic peptides B precursor (SEQ ID NO: 138) [Contains: Gamma-brain natriuretic peptide; Brain natriuretic peptide 32 (BNP-32)] is known or believed to have the following function(s): Acts as a cardiac hormone with a variety of biological actions including natriuresis, diuresis, vasorelaxation, and inhibition of renin and aldosterone secretion. It is thought to play a key role in cardiovascular homeostasis. Helps restore the body's salt and water balance. Improves heart function. Known polymorphisms for this sequence are as shown in Table 52.

TABLE 52
Amino acid mutations for Known Protein

| SNP position(s) | |
|---|---|
| on amino | |
| acid sequence | Comment |
| 25 | R -> L (in dbSNP:5227)./FTId = VAR_014580. |
| 47 | R -> H (in dbSNP:5229)./FTId = VAR_014581. |
| 93 | M -> L (in dbSNP:5230)./FTId = VAR_014582. |

[1046] Protein Natriuretic peptides B precursor (SEQ ID NO: 138) [Contains: Gamma-brain natriuretic peptide; Brain natriuretic peptide 32 (BNP-32)] localization is believed to be Secreted.

[1047] The previously known protein also has the following indication(s) and/or potential therapeutic use(s): Hepatic dysfunction; Hypertension; Heart failure; Asthma; Renal failure. It has been investigated for clinical/therapeutic use in humans, for example as a target for an antibody or small molecule, and/or as a direct therapeutic; available information related to these investigations is as follows. Potential pharmaceutically related or therapeutically related activity or activities of the previously known protein are as follows: Atrial peptide agonist; Diuretic. A therapeutic role for a protein represented by the cluster has been predicted. The cluster was assigned this field because there was information in the drug database or the public databases (e.g., described herein above) that this protein, or part thereof, is used or can be used for a potential therapeutic indication: Hepatoprotective; Antihypertensive; Antihypertensive, diuretic; Cardiostimulant; Vasodilator, coronary; Urological; Antiasthma; COPD treatment.

[1048] The following GO Annotation(s) apply to the previously known protein. The following annotation(s) were found: fluid secretion, which are annotation(s) related to Biological Process; diuretic hormone, which are annotation(s) related to Molecular Function; and extracellular space, which are annotation(s) related to Cellular Component.

[1049] The GO assignment relies on information from one or more of the SwissProt/TremBl Protein knowledgebase, available from <http://www.expasy.ch/sprot/>; or Locuslink, available from <http://www.ncbi.nlm.nih.gov/projects/LocusLink/>.

[1050] According to optional but preferred embodiments of the present invention, variants of this cluster according to the present invention (amino acid and/or nucleic acid sequences of HUMNATPEP) may optionally have one or more of the utilities described with regard to variants of ANP (cluster HUMCDDANF).

[1051] According to optional but preferred embodiments of the present invention, variants of this cluster according to the present invention may also have one or more of the following utilities, as described with regard to Table 53a below. It should be noted that these utilities are optionally and preferably suitable for human and non-human animals as subjects, except where otherwise noted. The reasoning is described with regard to biological and/or physiological and/or other information about the known protein, but is given to demonstrate particular diagnostic utility for the variants according to the present invention.

TABLE 53a
Utilities for Variants of HUMNATPEP, related to BNP

| | | |
|---|---|---|
| Marker for congestive | BNP levels in serum increase in CHF, | Clin Cardiol. 2004 |
| heart failure (CHF) | NT-proBNP is elevated in patients with stable angina | Sep; 27(9): 489-94. |
| and for acute and | pectoris and has a close correlation to disease severity | Am Heart J. 2004 |
| chronic coronary heart | | Oct; 148(4): 612-20. |
| disease | | |
| marker of long-term | NT-pro-BNP was measured in baseline serum samples | N Engi J Med. 2005 |
| mortality in patients | from 1034 patients referred for angiography because of | Feb 17; 352(7): 666- |
| with stable coronary | symptoms or signs of coronary heart disease. The rate | 75. |
| disease | of death from all causes was determined after a median | |
| | follow-up of nine years. The median NT-pro-BNP | |
| | level was significantly lower among patients who | |
| | survived than among those who died | |
| Marker for lone atrial | Median levels of nt-pro-BNP were significantly | J Am Coil Cardiol. |
| fibrillation | elevated in subjects with lone atrial fibrillation as | 2005 Jan 4; 45(1): 82-. |
| | compared with control subjects | 6. |
| Marker for coronary | BNP levels in patients with unstable angina and | Clin Exp Med. 2004 |
| heart disease, | myocardial infarction were significantly increased with | Sep; 4(1): 44-9. |
| especially in acute | respect to the group with stable angina (P < 0.01). | |
| coronary syndromes, | Analysis of peptide levels in relation to the number of | |
| even in the absence of | involved vessels demonstrated a significant increase in | |
| systolic dysfunction | patients with three-vessel disease compared with | |
| | subjects with one or two vessels involved (P < 0.03); | |
| | among subjects with mono-vessel disease, patients with | |
| | left descendent anterior stenosis had a more-marked | |
| | BNP elevation than subjects with stenosis in other | |
| | regions (P < 0.01). | |
| Predicts (in the | The prognostic value of plasma N-terminal-pro-brain | Am J Cardiol. 2004 |
| medium-term) good | natriuretic peptide (NT-pro-BNP) in 71 transplanted | Dec 15; 94(12): 1585- |
| chances of survival in | heart recipients during a 38 +/− 2 month follow-up. The | 7. |
| transplanted heart | negative predictive value of NT-pro-BNP levels | |
| recipients | </=800 pg/ml to predict death was 97% (95% | |
| | confidence interval 92 to 100). | |
| BNP levels before | Among 1,172 consecutive patients, the occurrence of | Am J Cardiol. 2004 |
| percutaneous coronary | death or MI increased significantly with baseline NT- | Dec 15; 94(12): 1481- |
| intervention (PCI) | pro-BNP before PCI | 5. |
| provides important, | | |
| independent prognostic | | |
| information for the | | |
| occurrence of death or | | |
| nonfatal MI during | | |
| long-term follow-up. | | |
| BNP and ANP can be | Plasma BNP (pmol/L) and ANP (pmol/L) were | J Renin Angiotensin |
| useful diagnostic tools | determined in 68 hypertensive patients with dilated | Aldosterone Syst. |
| in hypertensive CHF | cardiomyopathy, NYHA class III-IV and ejection | 2004 Sep; 5(3): 121-9. |
| patients with | fraction (EF) < or = 40%, and in 26 normal controls. | |
| moderate-to-severe LV | Statistical analysis for BNP and ANP was done by | |
| dysfunction and also | Students t-test. The patient group was randomly | |
| used for progonosis | subdivided into two subgroups of 34 patients, each | |
| | treated with either an ARB, irbesartan, or an ACE | |
| | inhibitor (ACE-I), captopril. BNP and ANP were | |
| | measured in both subsamples and correlated with | |
| | clinical, functional and neurohormonal parameters | |
| | throughout a follow-up period of six months and at the | |
| | sixth month. RESULTS: The mean EF in the patient | |
| | sample was 33.43 +/− 6.52% and in the controls was | |
| | 61.96 +/− 3.53% (p = 0.000). The mean BNP (pmol/L) in | |
| | patients was 44.78 +/− 54.36 and in the controls was | |
| | 7.12 +/− 8.28 (p = 0.000) and the mean ANP (pmol/L) | |
| | was 30.32 +/− 25.97 in patients and 11.18 +/− 7.92 in | |
| | controls (p = 0.000). A statistically significant difference | |
| | was found between patients and healthy controls. | |
| | Significant correlations were found between natriuretic | |
| | peptides and EF. Between the baseline phase and the | |
| | sixth month, BNP and ANP decreased significantly in | |
| | the ARB group. At the sixth month, both BNP and | |
| | ANP were lower in the ARB group. Evidence of | |
| | clinical benefit was found with both ARB or ACE-I | |
| | treatment throughout the six months, with patients | |
| | moving from classes III and IV to class II NYHA. | |
| | Improvement of EF was also found, with transition of | |
| | patients with lower EF (even <30%) to higher values. | |
| | EF was higher in the ARB group at the sixth month. | |
| diagnosis of left | BNP levels are elevated in asymptomatic or | Diabetes Metab. 2004 |
| ventricular dysfunction | symptomatic left ventricular dysfunction, hypertrophy | Sep; 30(4): 381-6. |
| | and coronary artery disease. | |
| Prediction of | BNP levels are elevated in infants with PPHN but not | Pediatrics. 2004 |
| pulmonary | in infants with other forms of respiratory distress not | Nov; 114(5): 1297- |
| hypertension (PPHN) | associated with PPHN | 304. |
| of term or near-term | | |
| infants with respiratory | | |
| distress | | |
| BNP as a predictor of | In patients with persistent atrial fibrillation, BNP levels | Can J Cardiol. 2004 |
| successful | are associated with successful cardioversion and | Oct; 20(12): 1245-8. |
| cardioversion in | maintenance of sinus rhythm two weeks after | |
| patients with persistent | cardioversion. | |
| atrial fibrillation | | |
| BNP reflects the | BNP was the only biochemical parameter that | Int J Cardiol. 2004 |
| remodelling process in | independently predicted interventricular septal diastolic | Nov; 97(2): 251-6. |
| hypertension. | diameter (p < 0.05), left ventricular mass index (p < 0.01) | |
| | and ratio of the velocity-time integrals of the E and A | |
| | waves of the mitral inflow in a stepwise logistic | |
| | regression analysis (p < 0.05). | |
| predict mortality in | growing evidence supports the hypothesis that BNP | Int J Infect Dis. 2004 |
| septic shock | could be an early predictor of mortality in septic shock | Sep; 8(5): 271-4 |
| Can be used for | A decrease in BNP level of > or = 50% during the first | Congest Heart Fail. |
| predicting response to | 3 months on epoprostenol was strongly predictive of | 2004 Sep- |
| epoprostenol therapy | event-free survival (p = 0.003 | Oct; 10(5): 221-5. |
| in pulmonary arterial | | |
| hypertension | | |
| Can be used as a | Increased NT pro-BNP was closely linked to severity | Am J Cardiol. 2004 |
| marker to evaluate | | Sep 15; 94(6): 740-5. |
| severity of aortic | | |
| stenosis, monitor | | |
| disease progression at | | |
| an early stage, and | | |
| decide on the optimal | | |
| time for aortic valve | | |
| replacement AVR. | | |
| Strong predictor of | B-type natriuretic peptide levels by themselves were | N Engl J Med. 2002 |
| heart failure (HF) in | more accurate than any historical or physical findings | Jul 18; 347(3): 161-7 |
| patients with the chief | or laboratory values in identifying congestive heart | |
| complaint of dyspnea | failure as the cause of dyspnea | |
| BNP ratio before and | BNP is elevated in end-stage renal disease before | Gun Nephrol. 1995 |
| after dialysis could be | dialysis and drops 20-40% after a dialysis session. | Nov; 44 Suppl 1: S61- |
| used as a measure of | | 4 |
| volume reduction and | | |
| resultant decreased left | | |
| ventricular wall | | |
| tension in patients with | | |
| end-stage renal disease | | |
| A rapid assay for BNP | Patients diagnosed with evidence of abnormal LV | Circulation. 2002 Feb |
| can reliably detect the | diastolic function (n = 119) had a mean BNP | 5; 105(5): 595-601 |
| presence of diastolic | concentration of 286 +/− 31 pg/mL; those in the normal | |
| abnormalities on | LV group (n = 175) had a mean BNP concentration of | |
| echocardiography | 33 +/− 3 pg/mL | |
| Screening: can be used | At study entry, plasma BNP and the heart failure | J Am Coil Cardiol. |
| to identify patients | survival score (HFSS) showed a significant correlation | 2001 |
| with heart failure who | (r = −0.706). During follow-up, Kaplan-Meier estimates | Dec; 38(7): 1934-41. |
| have an increased risk | of freedom from clinical events differed significantly | |
| of deterioration of their | for patients above and below the 75th percentile | |
| functional status | concentrations of plasma BNP (p < 0.0001). Changes | |
| | in plasma BNP were significantly related to changes in | |
| | limitations of physical activity, as demonstrated by | |
| | logistic regression analysis (chi-square statistic = 24.9, | |
| | p < 0.0001). Proportional hazards analysis confirmed | |
| | BNP as a powerful predictor of functional status | |
| | deterioration (p < 0.0001). | |
| plasma biomarker for | Elevation of the plasma BNP concentration is more | Mayo Clin Proc. |
| ventricular | specifically related to left ventricular hypertrophy | 2001 |
| hypertrophy in dialysis | compared with the other natriuretic peptides levels in | Nov; 76(11): 1111-9 |
| patients with end-stage | patients with end-stage renal disease independent of | |
| renal disease (ESRD) | congestive heart failure | |
| BNP levels are a | BNP levels, in addition to other neurohormonal, | Circulation. 2002 |
| strong, independent | clinical, and hemodynamic variables, were obtained | May |
| predictor of sudden | from 452 patients with a left ventricular ejection | 21; 105(20): 2392-7 |
| death in patients with | fraction (LVEF) < or = 35%. For prediction of sudden | |
| CHF. | death, only survivors without heart transplantation | |
| | (HTx) or a mechanical assist device and patients who | |
| | died suddenly were analyzed. Up to 3 years, 293 | |
| | patients survived without HTx or a mechanical assist | |
| | device, 89 patients died, and 65 patients underwent | |
| | HTx. Mode of death was sudden in 44 patients (49%), | |
| | whereas 31 patients (35%) had pump failure and 14 | |
| | patients (16%) died from other causes. Univariate risk | |
| | factors of sudden death were log BNP (P = 0.0006), log | |
| | N-terminal atrial natriuretic peptide (P = 0.003), LVEF | |
| | (P = 0.005), log N-terminal BNP (P = 0.006), systolic | |
| | blood pressure (P = 0.01), big endothelin (P = 0.03), and | |
| | NYHA class (P = 0.04). In the multivariate model, log | |
| | BNP level was the only independent predictor of | |
| | sudden death (P = 0.0006). Using a cutoff point of log | |
| | BNP < 2.11 (130 pg/mL), Kaplan-Meier sudden death- | |
| | free survival rates were significantly higher in patients | |
| | below (99%) compared with patients above (81%) this | |
| | cutoff point (P = 0.0001). | |
| Marker for allograft | Higher BNP levels in patients long after heart | Am J Cardiol. 2004 |
| performance after | transplantation are associated with allograft | Aug 15; 94(4): 454-8 |
| heart transplantation | dysfunction and cardiac allograft vasculopathy and are | |
| | strongly and independently predictive of cardiovascular | |
| | death | |
| Can be used as a | 233 individuals with HF risk factors attended an HF | Congest Heart Fail. |
| screening tool to detect | screening sessions - all specifically without a history of | 2003 May- |
| patients progressing | HF. Of the 233 subjects screened, the majority (92%) | Jun; 9(3): 127-32. |
| from stage A to stage | had > or = 1 risk factor with an average of 2.8 risk | |
| B in heart failure | factors for HF. Many subjects also had symptoms | |
| | consistent with HF. A total of 24 subjects (10.3%) had | |
| | a BNP level >100 pg/mL, and a total of 32 subjects | |
| | (13.7%) had a level >80 pg/mL. The follow-up data | |
| | showed that all 24 subjects saw their physician within 6 | |
| | months after the screening. By 12 months following the | |
| | initial screening program, 21 of the 24 subjects with | |
| | elevated BNP levels (88%) underwent further testing | |
| | and 18 of the 24 (67%) had changes in their | |
| | medications. BNP screening identifies subjects at high | |
| | risk for developing HF | |
| Prognostic determinant | NT-proBNP appeared to be more sensitive than | Circulation. 2003 |
| in light-chain | conventional echocardiographic parameters in | May |
| amyloidosis | detecting clinical improvement or worsening of | 20; 107(19): 2440-5. |
| | amyloid cardiomyopathy during follow-up | Epub 2003 Apr 28 |
| Marker for myocarditis | Immunohistochemical analysis of endomyocardial | Int J Cardiol. 1995 |
| | biopsy specimens showed ANP and BNP | Dec; 52(3): 213-22. |
| | immunoreactivity in the early myocarditis group (ANP | |
| | in 4/10 and BNP in 3/10) and the late myocarditis | |
| | group (ANP and BNP in 4/10), but not in the controls | |
| | (0/8). | |
| Marker for assessment | BNP level was increased in non-ST elevation acute | Yonsei Med J. 2004 |
| of myocardial | coronary syndrome patients compared with stable | Apr 30; 45(2): 255-62 |
| ischemia in non-ST | angina patients (133.9 +/− 87.4 vs. 12.2 +/− 9.2 pg/mL, | |
| elevation acute | p < 0.05). | |
| coronary syndrome | | |
| Marker for symptom | Plasma natriuretic peptide levels are elevated in | Circulation. 2003 Apr |
| onset in aortic stenosis | symptomatic patients with aortic stenosis. | 15; 107(14): 1884-90. |
| | Measurement of natriuretic peptides may complement | Epub 2003 Mar 31 |
| | clinical and echocardiographic evaluation of patients | |
| | with aortic stenosis. | |
| Marker for Acute | Plasma N-terminal pro-brain natriuretic peptide is | Eur Respir J. 2003 |
| pulmonary embolism | elevated in the majority of cases of pulmonary | Oct; 22(4): 649-53 |
| | embolism resulting in right ventricular overload. | |
| | Plasma levels reflect the degree of right ventricular | |
| | overload and may help to predict short-term outcome | |
| Assessing the | Plasma concentrations of ANP and BNP in the | Circ J. 2004 |
| myocardial infarction | peripheral blood were measured in 88 asymptomatic | Oct; 68(10): 923-7 |
| size | (New York Heart Association class I) patients with | |
| | previous MI. The infarct size was quantitatively | |
| | calculated from rest thallium-201 myocardial single | |
| | photon emission computed tomography. In multivariate | |
| | linear regression analysis that included MI size, | |
| | hemodynamic parameters, and age as covariables, only | |
| | BNP concentrations had a significant association with | |
| | MI size (p = 0.0001) | |
| Marker for rheumatic | increased plasma BNP levels in patients with rheumatic | Eur J Heart Fail. |
| heart disease | heart disease compared with healthy subjects. | 2004 Oct; 6(6): 757-60 |
| Detection of | Fifty-one patients with valve disease underwent single | Int J Cardiol. 2004 |
| asymptomatic valvular | valve surgery (mitral stenosis, MS, 13; mitral | Jul; 96(1): 21-4. |
| disease, and is a | regurgitation, MR, 16; aortic stenosis, AS, 14; aortic | |
| clinical marker for | regurgitation, AR, 8 patients). Blood samples, | |
| determining the | echocardiographic and cardiac catheterization data | |
| optimal surgical timing | were obtained before operation and echocardiographic | |
| | examination were performed after 1-year of operations. | |
| | RESULTS: In patients subjected to single heart valve | |
| | surgery, plasma BNP mean levels were 214.6 +/− 48.5 | |
| | pg/ml. In plasma BNP levels, there was only | |
| | significant difference between MS and AS group (MS | |
| | 67.5 +/− 9.7 vs. AS 314.3 +/− 112.0 pg/ml, P = 0.04). There | |
| | were no relationships between plasma BNP levels and | |
| | pre-operative cardiac functions. After 1-year of the | |
| | valve surgery, NYHA functional class was reduced in | |
| | 36 patients (70.6%) and plasma BNP levels before the | |
| | surgery significantly correlated with post-operative | |
| | NYHA functional class | |
| Marker for | plasma ANP and BNP levels could be markers for | Med Pediatr Oncol. |
| cardiotoxicity of drugs | doxorubicin-induced cardiotoxicity in children | 2001 Jul; 37(1): 4-9. |
| Marker for chronic | plasma BNP or ANP level may be a useful indicator | Respir Med. 1999 |
| respiratory failure with | for detecting the presence of cor pulmonale in patients | Jul; 93(7): 507-14 |
| cor pulmonale | with chronic respiratory failure. | |
| Marker for lung cancer | Human small cell lung cancer cells produce brain | Oncology. |
| | natriuretic peptide. | 1999; 56(2): 155-9 |
| Marker for adrenal | immunoreactive BNP is present both in normal human | Eur J Endocrinol. |
| related tumors | adrenal glands and in adrenal tumors. Multiple | 1996 Sep; 135(3): 352- |
| | molecular forms of BNP were found to be present in | 6 |
| | the tumor tissues of pheochromocytoma and | |
| | aldosteronoma | |

[1052] According to other optional embodiments of the present invention, variants of this cluster according to the present invention (amino acid and/or nucleic acid sequences of HUMNATPEP) may optionally have one or more of the following utilities, some of which are related to utilities described above. It should be noted that these utilities are optionally and preferably suitable for human and non-human animals as subjects, except where otherwise noted.

[1053] A non-limiting example of such a utility is the detection of coronary artery disease (in conjunction with stress testing, such that the subject undergoes cardiac stress testing, during or after which BNP is detected and/or measured, quantitatively or qualitatively), optionally and preferably including risk assessment and stratification. For example, the method could optionally be performed as follows: measuring a baseline level of a marker related to BNP in the subject; inducing a cardiac stress in the subject; measuring the marker related to BNP level immediately post cardiac stress; and calculating a relative change in the marker related to BNP level; wherein coronary artery disease is detected in the subject if the relative change in marker related to BNP level after cardiac stress is greater than a predetermined clinically effective threshold value. Optionally and preferably, risk assessment/stratification may be performed according to the relative change; the higher the relative change, the greater the risk (and presumably also the more severe the coronary artery disease). Cardiac stress may optionally be induced through exercise stress testing, for example, and/or pharmacologic stress testing (for example through the administration of dobutamine).

[1054] Optionally, the test may be performed in a subject with no previous history of cardiac disease, and/or in a subject with one or risk factors for cardiac disease, including but not limited to, age greater than 35 years, history of smoking, diabetes mellitus, obesity, high blood pressure, high cholesterol, elevated low density lipoproteins and family history of cardiac disease.

[1055] Use of the known protein, BNP, for such a diagnostic utility has been described in US Patent Application No. 20040243010, hereby incorporated by reference as if fully set forth herein.

[1056] Another non-limiting example of such a utility is the diagnosis of acute coronary syndrome, for example related to some type of myocardial injury, optionally and preferably by performing a method of diagnosing myocardial ischemia and/or myocardial necrosis in a subject, the method comprising: determining a level of BNP variant according to the present invention (a HUMNATPEP protein, protein fragment, oligonucleotide or fragment thereof) in a sample obtained from the subject; and correlating the level of BNP variant to the presence or absence of myocardial ischemia in the subject. The term “acute coronary syndromes” (“ACS”) has been applied to a group of coronary disorders that result from ischemic insult to the heart, also referred to as myocardial injury or myocardial damage, that is commonly secondary to atherosclerosis or hypertension, and is the leading cause of death in the United States. ACS is commonly caused by occlusion associated with coronary artery disease cause by atherosclerotic plaque formation and progression to either further occlusion or fissure. ACS can be manifested as stable angina, unstable angina, or myocardial infarction.

[1057] The terms “ischemia and ischemic” relate to damage to the myocardium as a result of a reduction of blood flow to the heart. The terms “angina pectoris”, “stable angina”, “unstable angina”, “silent ischemia” are generally related to myocardial ischemia. One skilled in the art will recognize these terms, which are described in “The Merck Manual of Diagnosis and Therapy” Seventeenth Edition, 1999, Ed. Keryn A. G. Lane, pp. 1662-1668, incorporated by reference as if fully set forth herein. The term ischemia is also related to what one skilled in the art would consider as minor myocardial injury or damage. The term ischemia is further described in the Journal of the American College of Cardiology 36, 959-969 (2000), incorporated by reference as if fully set forth herein.

[1058] The terms “necrosis and necrotic” relate to myocardial cell death as a result of a reduction or stoppage of blood flow to the heart. Myocardial necrosis is a condition of the heart which is more severe than myocardial ischemia. The term “myocardial infarction” is generally related to myocardial necrosis. One skilled in the art will recognize these terms, which are described in “The Merck Manual of Diagnosis and Therapy” Seventeenth Edition, 1999, Ed. Keryn A. G. Lane, pp. 1668-1677, incorporated by reference as if fully set forth herein. The term necrosis is also related to what one skilled in the art would consider as major myocardial injury or damage. The terms myocardial infarction and necrosis are further described in the Journal of the American College of Cardiology 36, 959-969 (2000), incorporated by reference as if fully set forth herein.

[1059] This method may optionally be performed concurrently with or following stress testing (described above). Correlating may optionally be performed (for example) by comparing the variant BNP level to a threshold variant BNP level, whereby, when the variant BNP level exceeds the threshold variant BNP level, the subject is diagnosed as having myocardial ischemia and/or myocardial necrosis. Optionally and preferably, the method is able to distinguish between myocardial ischemia and myocardial necrosis.

[1060] Use of the known protein, BNP, for such a diagnostic utility has been described in US Patent Application No. 20030109420, hereby incorporated by reference as if fully set forth herein.

[1061] Another non-limiting example of such a utility is the method of diagnosing cardiac transplant rejection, optionally including predicting and/or detecting such rejection, in a subject, by using a BNP variant according to the present invention. Optionally and preferably, a plurality of measurements may be made over time, for example to monitor a subject undergoing cardiac transplant.

[1062] Use of the known protein, BNP, for such a diagnostic utility has been described in U.S. Pat. No. 6,117,644, hereby incorporated by reference as if fully set forth herein.

[1063] Cluster HUMNATPEP encodes for variants of BNP, which belongs to a family of proteins that includes ANP and CNP. These proteins have a number of functions as described below for CRP (and as described elsewhere herein for ANP and variants thereof according to the present invention). These functions may optionally relate to one or more diagnostic utilities of variants of BNP (HUMNATPEP polypeptides and fragments, peptides, oligonucleotides and fragments and any other variant biomarker related thereto).

[1064] CNP mRNA is also found in the vascular endothelium, consistent with the peptide's putative autocrine/paracrine role in the regulation of vascular tone and cell growth (Komatsu et al., 1992; Furuya et al., 1993). Several cytokines, including transforming growth factor-h, interleukin-1a, tumor necrosis factor-a, and endotoxin, stimulate CNP mRNA expression (Yamamoto et al., 1997). CNP is more potent than ANP in eliciting smooth muscle relaxation but is a less potent inducer of diuresis and natriuresis (Sudoh et al., 1990; Clavell et al., 1993). Thus, in the cardiovascular system, CNP is likely to have primary local roles in the blood vessel wall rather than as a circulating natriuretic hormone (Komatsu et al., 1992). The 22-amino acid fragment is the mature and more active form and is expressed in the nervous system and endothelial cells (Ogawa et al., 1992; Espiner et al., 1995; Suzuki et al., 2001).

[1065] Table 53b below describes diagnostic utilities for the cluster HUMNATPEP that were found through microarrays, including the statistical significance thereof and a reference. One or more HUMNATPEP variants according to the present invention may optionally have one or more of these utilities.

TABLE 53b

| | Statistical | |
|---|---|---|
| Diagnostic utility | significance | reference |
| Gene over expressed in transitional cell | 0.006 | Ramaswamy S; Golub TR PNAS (2001) |
| carcinoma (vs. normal bladder), therefore | | Multiclass cancer diagnosis using tumor |
| could be used for the diagnosis of bladder | | gene expression signatures. |
| cancer | | |
| Staging and grading; detection of | 2.6e⁻⁶, 3.4e⁻⁴ | Dyrskjot L, Orntoft TF Nat Genet (2003) |
| advanced bladder tumors (stage Ta vs. T1 | respectively | Identifying distinct classes of bladder |
| & T2+, grade 2 vs. grade 3), over | | carcinoma using microarrays. |
| expression in the advanced tumors. | | |
| Gene over expressed in renal cell | 0.007 | Ramaswamy S; Golub TR PNAS (2001) |
| carcinoma (vs. normal) | | Multiclass cancer diagnosis using tumor |
| | | gene expression signatures. |
| Identification of thymus dysfunction, gene | | GNF database |
| over expressed in naive mature | | (http://www.ncbi.nlm.nih.gov/projects/geo/): |
| thymocytes (vs. immature thymocytes) | | GBS785, probe 206801_at |

[1066] Other non-limiting exemplary utilities for HUMNATPEP variants according to the present invention are described in greater detail below and also with regard to the previous section on clinical utility.

[1067] The heart-selective diagnostic marker prediction engine provided the following results with regard to cluster HUMNATPEP. Predictions were made for selective expression of transcripts of this contig in heart tissue, according to the previously described methods. The numbers on the y-axis of the first figure below refer to weighted expression of ESTs in each category, as “parts per million” (ratio of the expression of ESTs for a particular cluster to the expression of all ESTs in that category, according to parts per million).

[1068] Overall, the following results were obtained as shown with regard to the histogram in FIG. 17, concerning the number of heart-specific clones in libraries/sequences; as well as with regard to the histogram in FIG. 18, concerning the actual expression of oligonucleotides in various tissues, including heart.

[1069] This cluster was found to be selectively expressed in heart for the following reasons: in a comparison of the ratio of expression of the cluster in heart specific ESTs to the overall expression of the cluster in non-heart ESTs, which was found to be 17.3; the ratio of expression of the cluster in heart specific ESTs to the overall expression of the cluster in muscle-specific ESTs which was found to be 351.5; and fisher exact test P-values were computed both for library and weighted clone counts to check that the counts are statistically significant, and were found to be 8.20E-17.

[1070] One particularly important measure of specificity of expression of a cluster in heart tissue is the previously described comparison of the ratio of expression of the cluster in heart as opposed to muscle. This cluster was found to be specifically expressed in heart as opposed to non-heart ESTs as described above. However, many proteins have been shown to be generally expressed at a higher level in both heart and muscle, which is less desirable. For this cluster, as described above, the ratio of expression of the cluster in heart specific ESTs to the overall expression of the cluster in muscle-specific ESTs which was found to be 17.3, which clearly supports specific expression in heart tissue.

[1071] As noted above, cluster HUMNATPEP features 4 transcript(s), which were listed in Table 49 above. These transcript(s) encode for protein(s) which are variant(s) of protein Natriuretic peptides B precursor (SEQ ID NO: 138) [Contains: Gamma-brain natriuretic peptide; Brain natriuretic peptide 32 (BNP-32)]. A description of each variant protein according to the present invention is now provided.

[1072] Variant protein HUMNATPEP_PEA_{—}1_P2 (SEQ ID NO:139) according to the present invention has an amino acid sequence; it is encoded by transcript(s) HUMNATPEP_PEA_{—}1_T1 (SEQ ID NO:127). An alignment is given to the known protein (Natriuretic peptides B precursor (SEQ ID NO: 138) [Contains: Gamma-brain natriuretic peptide; Brain natriuretic peptide 32 (BNP-32)]) at the end of the application. One or more alignments to one or more previously published protein sequences are given in the alignment table located on the attached CDROM. A brief description of the relationship of the variant protein according to the present invention to each such aligned protein is as follows:

[1073] Comparison report between HUMNATPEP_PEA_{—}1_P2 (SEQ ID NO:139) and ANFB_HUMAN (SEQ ID NO:138):

[1074] 1. An isolated chimeric polypeptide encoding for HUMNATPEP_PEA_{—}1_P2 (SEQ ID NO:139), comprising a first amino acid sequence being at least 90% homologous to MDPQTAPSRALLLLLFLHLAFLGGRSHPLGSPGSASDLETSGLQEQRNHLQGKLSELQVEQTSLEPL QESPRPTGVWKSREVATEGIRGHRKMVLYTLRAPRSPKMVQGSGCFGRKMDRISSSSGLGCK corresponding to amino acids 1-129 of ANFB_HUMAN (SEQ ID NO:138), which also corresponds to amino acids 1-129 of HUMNATPEP_PEA_{—}1_P2 (SEQ ID NO:139), and a second amino acid sequence being at least 70%, optionally at least 80%, preferably at least 85%, more preferably at least 90% and most preferably at least 95% homologous to a polypeptide having the sequence GKHPLPPRPPSPIPVCDTVRVTLGFVVSGNHTL (SEQ ID NO: 640) corresponding to amino acids 130-162 of HUMNATPEP_PEA_{—}1_P2 (SEQ ID NO:139), wherein said first amino acid sequence and second amino acid sequence are contiguous and in a sequential order.

[1075] 2. An isolated polypeptide encoding for a tail of HUMNATPEP_PEA_{—}1_P2 (SEQ ID NO:139), comprising a polypeptide being at least 70%, optionally at least about 80%, preferably at least about 85%, more preferably at least about 90% and most preferably at least about 95% homologous to the sequence GKHPLPPRPPSPIPVCDTVRVTLGFVVSGNHTL (SEQ ID NO: 640) in HUMNATPEP_PEA_{—}1_P2 (SEQ ID NO:139).

[1076] The location of the variant protein was determined according to results from a number of different software programs and analyses, including analyses from SignalP and other specialized programs. The variant protein is believed to be located as follows with regard to the cell: secreted. The protein localization is believed to be secreted because both signal-peptide prediction programs predict that this protein has a signal peptide, and neither trans-membrane region prediction program predicts that this protein has a trans-membrane region.

[1077] The variant protein has the following domains, as determined by using InterPro. The domains are described in Table 54:

TABLE 54
InterPro domain(s)

| | | | Position(s) |
|---|---|---|---|
| InterPro ID | Domain description | Analysis type | on protein |
| IPR000663 | Natriuretic peptide | FPrintScan | 109-118, |
| | | | 118-127 |
| IPR002408 | Natriuretic peptide, | FPrintScan | 11-27, 110-120, |
| | brain type | | 120-133, 28-38, |
| | | | 43-61 |
| IPR000663 | Natriuretic peptide | HMMPfam | 46-128 |
| IPR000663 | Natriuretic peptide | HMMSmart | 105-128 |
| IPR000663 | Natriuretic peptide | ScanRegExp | 112-128 |
| IPR002408 | Natriuretic peptide, | BlastProDom | 27-129 |
| | brain type | | |

[1078] Variant protein HUMNATPEP_PEA_{—}1_P2 (SEQ ID NO:139) is encoded by the following transcript(s): HUMNATPEP_PEA_{—}1_T1 (SEQ ID NO:127). The coding portion of transcript HUMNATPEP_PEA_{—}1_T1 (SEQ ID NO:127) starts at position 249 and ends at position 734.

[1079] Variant protein HUMNATPEP_PEA_{—}1_P3 (SEQ ID NO:140) according to the present invention has an amino acid sequence; it is encoded by transcript(s) HUMNATPEP_PEA_{—}1_T2 (SEQ ID NO:128). An alignment is given to the known protein (Natriuretic peptides B precursor (SEQ ID NO: 138) [Contains: Gamma-brain natriuretic peptide; Brain natriuretic peptide 32 (BNP-32)]) at the end of the application. One or more alignments to one or more previously published protein sequences are given in the alignment table located on the attached CDROM. A brief description of the relationship of the variant protein according to the present invention to each such aligned protein is as follows:

[1080] Comparison report between HUMNATPEP_PEA_{—}1_P3 (SEQ ID NO:140) and ANFB_HUMAN (SEQ ID NO:138):

[1081] 1. An isolated chimeric polypeptide encoding for HUMNATPEP_PEA_{—}1_P3 (SEQ ID NO:140), comprising a first amino acid sequence being at least 90% homologous to MDPQTAPSRALLLLLFLHLAFLGGRSHPLGSPGSASDLETSGLQ corresponding to amino acids 1-44 of ANFB_HUMAN (SEQ ID NO:138), which also corresponds to amino acids 1-44 of HUMNATPEP_PEA_{—}1_P3 (SEQ ID NO:140), and a second amino acid sequence being at least 70%, optionally at least 80%, preferably at least 85%, more preferably at least 90% and most preferably at least 95% homologous to a polypeptide having the sequence VRAEGSSGGLDSSNERVLTCCPKRPSSFLWN (SEQ ID NO: 641) corresponding to amino acids 45-75 of HUMNATPEP_PEA_{—}1_P3 (SEQ ID NO:140), wherein said first amino acid sequence and second amino acid sequence are contiguous and in a sequential order.

[1082] 2. An isolated polypeptide encoding for a tail of HUMNATPEP_PEA_{—}1_P3 (SEQ ID NO:140), comprising a polypeptide being at least 70%, optionally at least about 80%, preferably at least about 85%, more preferably at least about 90% and most preferably at least about 95% homologous to the sequence VRAEGSSGGLDSSNERVLTCCPKRPSSFLWN (SEQ ID NO: 641) in HUMNATPEP_PEA_{—}1_P3 (SEQ ID NO:140).

[1083] The location of the variant protein was determined according to results from a number of different software programs and analyses, including analyses from SignalP and other specialized programs. The variant protein is believed to be located as follows with regard to the cell: secreted. The protein localization is believed to be secreted because both signal-peptide prediction programs predict that this protein has a signal peptide, and neither trans-membrane region prediction program predicts that this protein has a trans-membrane region.

[1084] The variant protein has the following domains, as determined by using InterPro. The domains are described in Table 55:

TABLE 55
InterPro domain(s)

| | | | Position(s) |
|---|---|---|---|
| InterPro ID | Domain description | Analysis type | on protein |
| IPR002408 | Natriuretic peptide, brain type | FPrintScan | 11-27, |
| | | | 28-38 |
| IPR002408 | Natriuretic peptide, brain type | BlastProDom | 27-54 |
| IPR002408 | Natriuretic peptide, brain type | FPrintScan | 11-27, |
| | | | 28-38 |
| IPR002408 | Natriuretic peptide, brain type | BlastProDom | 27-54 |

[1085] Variant protein HUMNATPEP_PEA_{—}1_P3 (SEQ ID NO:140) is encoded by the following transcript(s): HUMNATPEP_PEA_{—}1_T2 (SEQ ID NO: 128). The coding portion of transcript HUMNATPEP_PEA_{—}1_T2 (SEQ ID NO:128) starts at position 249 and ends at position 473.

[1086] Variant protein HUMNATPEP_PEA_{—}1_P7 (SEQ ID NO:141) according to the present invention has an amino acid sequence; it is encoded by transcript(s) HUMNATPEP_PEA_{—}1_T4 (SEQ ID NO:130). An alignment is given to the known protein (Natriuretic peptides B precursor (SEQ ID NO: 138) [Contains: Gamma-brain natriuretic peptide; Brain natriuretic peptide 32 (BNP-32)]) at the end of the application. One or more alignments to one or more previously published protein sequences are given in the alignment table located on the attached CDROM. A brief description of the relationship of the variant protein according to the present invention to each such aligned protein is as follows:

[1087] Comparison report between HUMNATPEP_PEA_{—}1_P7 (SEQ ID NO:141) and ANFB_HUMAN (SEQ ID NO:138):

[1088] 1. An isolated chimeric polypeptide encoding for HUMNATPEP_PEA_{—}1_P7 (SEQ ID NO:141), comprising a first amino acid sequence being at least 90% homologous to MVLYTLRAPRSPKMVQGSGCFGRKMDRISSSSGLGCKVLRRH corresponding to amino acids 93-134 of ANFB_HUMAN (SEQ ID NO:138), which also corresponds to amino acids 1-42 of HUMNATPEP_PEA_{—}1_P7 (SEQ ID NO:141).

[1089] The location of the variant protein was determined according to results from a number of different software programs and analyses, including analyses from SignalP and other specialized programs. The variant protein is believed to be located as follows with regard to the cell: intracellularly. The protein localization is believed to be intracellularly because of manual inspection of known protein localization and/or gene structure.

[1090] The variant protein has the following domains, as determined by using InterPro. The domains are described in Table 56:

TABLE 56
InterPro domain(s)

| | | | Position(s) on |
|---|---|---|---|
| InterPro ID | Domain description | Analysis type | protein |
| IPR000663 | Natriuretic peptide | FPrintScan | 17-26, 26-35 |
| IPR002408 | Natriuretic peptide, brain | FPrintScan | 18-28, 28-41 |
| | type | | |
| IPR000663 | Natriuretic peptide | HMMPfam | 1-36 |
| IPR000663 | Natriuretic peptide | HMMSmart | 13-36 |
| IPR000663 | Natriuretic peptide | ScanRegExp | 20-36 |
| IPR002408 | Natriuretic peptide, brain | BlastProDom | 1-42 |
| | type | | |

[1091] Variant protein HUMNATPEP_PEA_{—}1_P7 (SEQ ID NO:141) is encoded by the following transcript(s): HUMNATPEP_PEA_{—}1_T4 (SEQ ID NO:130). The coding portion of transcript HUMNATPEP_PEA_{—}1_T4 (SEQ ID NO:130) starts at position 257 and ends at position 382.

[1092] Table 57 below describes the starting and ending position of HUMNATPEP_PEA_{—}1_node_{—}2 (SEQ ID NO:133) on each of the relevant transcripts. Experimental results for this segment are described below.

TABLE 57
Segment location on transcripts

| | Segment | Segment |
|---|---|---|
| Transcript name | starting position | ending position |
| HUMNATPEP_PEA_1_T2 | 381 | 612 |
| (SEQ ID NO: 128) | | |
| HUMNATPEP_PEA_1_T3 | 381 | 612 |
| (SEQ ID NO: 129) | | |

[1093] Table 58 below describes the starting and ending position of HUMNATPEP_PEA_{—}1_node_{—}3 (SEQ ID NO:134) on each of the relevant transcripts. Experimental results for this segment are described below.

TABLE 58
Segment location on transcripts

| | Segment | Segment |
|---|---|---|
| Transcript name | starting position | ending position |
| HUMNATPEP_PEA_1_T1 (SEQ | 381 | 508 |
| ID NO: 127) | | |
| HUMNATPEP_PEA_1_T2 (SEQ | 613 | 740 |
| ID NO: 128) | | |
| HUMNATPEP_PEA_1_T3 (SEQ | 613 | 740 |
| ID NO: 129) | | |

[1094] Table 59 below describes the starting and ending position of HUMNATPEP_PEA_{—}1_node_{—}4 (SEQ ID NO:135) on each of the relevant transcripts. Experimental results for this segment are described below.

TABLE 59
Segment location on transcripts

| | Segment | Segment |
|---|---|---|
| Transcript name | starting position | ending position |
| HUMNATPEP_PEA_1_T1 (SEQ | 509 | 636 |
| ID NO: 127) | | |
| HUMNATPEP_PEA_1_T2 (SEQ | 741 | 868 |
| ID NO: 128) | | |
| HUMNATPEP_PEA_1_T3 (SEQ | 741 | 868 |
| ID NO: 129) | | |
| HUMNATPEP_PEA_1_T4 (SEQ | 241 | 368 |
| ID NO: 130) | | |

[1095] Table 60 below describes the starting and ending position of HUMNATPEP_PEA_{—}1_node_{—}5 (SEQ ID NO:136) on each of the relevant transcripts. Experimental results for this segment are described below.

TABLE 60
Segment location on transcripts

| | Segment | Segment |
|---|---|---|
| Transcript name | starting position | ending position |
| HUMNATPEP_PEA_1_T1 (SEQ | 637 | 1178 |
| ID NO: 127) | | |
| HUMNATPEP_PEA_1_T3 (SEQ | 869 | 1410 |
| ID NO: 129) | | |

Expression of Homo sapiens natriuretic peptide precursor B (NPPB) HUMNATPEP transcripts which are detectable by amplicon as depicted in sequence name HUMNATPEP seg3-4WT (SEQ ID NO: 144) specifically in heart tissue

[1096] Expression of Homo sapiens natriuretic peptide precursor B (NPPB) transcripts detectable by or according to seg3-4 node, HUMNATPEP seg3-4WT (SEQ ID NO: 144) amplicon and primers HUMNATPEP seg3-4WT-F (SEQ ID NO: 142) and HUMNATPEP seg3-4WT-R (SEQ ID NO: 143) was measured by real time PCR (this transcript relates to the known protein, or “WT” protein). In parallel the expression of four housekeeping genes—RPL19 (GenBank Accession No. NM_{—}000981 (SEQ ID NO:7); RPL19 amplicon (SEQ ID NO: 38)), TATA box (GenBank Accession No. NM_{—}003194 (SEQ ID NO:2); TATA amplicon (SEQ ID NO: 53)), Ubiquitin (GenBank Accession No. BC000449 (SEQ ID NO:9); amplicon—Ubiquitin-amplicon (SEQ ID NO:50)) and SDHA (GenBank Accession No. NM_{—}004168 (SEQ ID NO:4); amplicon—SDHA-amplicon (SEQ ID NO:29)) was measured similarly. For each RT sample, the expression of the above amplicons was normalized to the geometric mean of the quantities of the housekeeping genes. The normalized quantity of each RT sample was then divided by the median of the quantities of the heart samples (Sample Nos. 44-46, Table 7, “Tissue samples in normal panel” above), to obtain a value of expression for each sample relative to median of the heart samples.

[1097] FIG. 19 is a histogram showing relative expression of the above-indicated Homo sapiens natriuretic peptide precursor B (NPPB) known protein transcripts in heart tissue samples as opposed to other tissues.

[1098] As is evident from FIG. 19, the expression of Homo sapiens natriuretic peptide precursor B (NPPB) transcripts detectable by the above amplicon in heart tissue samples was higher than in the other samples (Sample Nos. 44-46 Table 7, “Tissue samples in normal panel”). Note that the expression of the above amplicon in one of the heart samples, sample no. 45, was higher compared to its expression in the other two heart samples (sample 44 and 46). Sample no. 45 is from fibrotic heart, and samples 44 and 46 are samples from normal hearts.

[1099] Primer pairs are also optionally and preferably encompassed within the present invention; for example, for the above experiment, the following primer pair was used as a non-limiting illustrative example only of a suitable primer pair: HUMNATPEP seg3-4WT-F (SEQ ID NO: 142) forward primer; and HUMNATPEP seg3-4WT-R (SEQ ID NO: 143) reverse primer.

[1100] The present invention also preferably encompasses any amplicon obtained through the use of any suitable primer pair; for example, for the above experiment, the following amplicon was obtained as a non-limiting illustrative example only of a suitable amplicon: HUMNATPEP seg3-4WT (SEQ ID NO: 144).

Forward primer HUMNATPEP seg3-4WT-F
(SEQ ID NO:142):
GTCCGGGTTACAGGAGCAGC
Reverse primer HUMNATPEP seg3-4WT-R
(SEQ ID NO:143):
CCGCCTCAGCACTTTGCAG
Amplicon HUMNATPEP seg3-4WT (SEQ ID NO:144):
GTCCGGGTTACAGGAGCAGCGCAACCATTTGCAGGGCAAACTGTCGGAGC
TGCAGGTGGAGCAGACATCCCTGGAGCCCCTCCAGGAGAGCCCCCGTCCC
ACAGGTGTCTGGAAGTCCCGGGAGGTAGCCACCGAGGGCATCCGTGGGCA
CCGCAAAATGGTCCTCTACACCCTGCGGGCACCACGAAGCCCCAAGATGG
TGCAAGGGTCTGGCTGCTTTGGGAGGAAGATGGACCGGATCAGCTCCTCC
AGTGGCCTGGGCTGCAAAGTGCTGAGGCGG

Expression of ANFB_HUMAN (SEQ ID NO:138) Natriuretic peptide HUMNATPEP transcripts which are detectable by amplicon as depicted in sequence name HUMNATPEP seg2 (SEQ ID NO: 147) specifically in heart tissue:

[1101] Expression of ANFB_HUMAN (SEQ ID NO:138) Natriuretic peptide transcripts detectable by or according to seg2 node, HUMNATPEPseg2 (SEQ ID NO: 147) amplicon and HUMNATPEPseg2F2 (SEQ ID NO: 145), HUMNATPEPseg2R2 (SEQ ID NO: 146) primers was measured by real time PCR. In parallel the expression of four housekeeping genes—RPL19 (GenBank Accession No. NM_{—}000981 (SEQ ID NO:7); RPL19 amplicon (SEQ ID NO: 38)), TATA box (GenBank Accession No. NM_{—}003194 (SEQ ID NO:2); TATA amplicon (SEQ ID NO: 53)), Ubiquitin (GenBank Accession No. BC000449 (SEQ ID NO:9); amplicon—Ubiquitin-amplicon (SEQ ID NO:50)) and SDHA (GenBank Accession No. NM_{—}004168 (SEQ ID NO:4); amplicon—SDHA-amplicon (SEQ ID NO:29)) was measured similarly. For each RT sample, the expression of the above amplicons was normalized to the geometric mean of the quantities of the housekeeping genes. The normalized quantity of each RT sample was then divided by the median of the quantities of the heart samples (Sample Nos. 44-46, Table 7, “Tissue samples in normal panel” above), to obtain a value of expression for each sample relative to median of the heart.

[1102] FIG. 20 is a histogram showing relative expression of the above-indicated ANFB_HUMAN (SEQ ID NO:138) Natriuretic peptides transcripts in heart tissue samples as opposed to other tissues.

[1103] As is evident from FIG. 20, the expression of ANFB_HUMAN (SEQ ID NO:138) Natriuretic peptide transcripts detectable by the above amplicon in heart tissue samples was higher than in most of the other samples (Sample Nos. 1-26, 28-43, 47-74 Table 7, “Tissue samples in normal panel”). Note that the expression of the above amplicon in one of the heart samples, sample no. 45, was higher compared to its expression in the other two heart samples (sample 44 and 46). Sample no. 45 is from fibrotic heart, and samples 44 and 46 are samples from normal hearts.

[1104] Primer pairs are also optionally and preferably encompassed within the present invention; for example, for the above experiment, the following primer pair was used as a non-limiting illustrative example only of a suitable primer pair: HUMNATPEPseg2F2 (SEQ ID NO: 145) forward primer; and HUMNATPEPseg2R2 (SEQ ID NO: 146) reverse primer.

[1105] The present invention also preferably encompasses any amplicon obtained through the use of any suitable primer pair; for example, for the above experiment, the following amplicon was obtained as a non-limiting illustrative example only of a suitable amplicon: HUMNATPEPseg2 (SEQ ID NO: 147).

| | |
|---|---|
| Forward primer HUMNATPEPseg2F2: | (SEQ ID NO: 145) |
| GCAGCAATGAAAGGGTCCTC | |
| Reverse primer HUMNATPEPseg2R2: | (SEQ ID NO: 146) |
| CATGGCACCCAAGTGAACC | |
| Amplicon HUMNATPEPseg2: | (SEQ ID NO: 147) |

GCAGCAATGAAAGGGTCCTCACCTGCTGTCCCAAGAGGCCCTCATCTTTCCTTTGGAATTAGT
GATAAAGGAATCAGAAAATGGAGAGACTGGGTGCCCTGACCCTGTACCCAAGGCAGTCGGTT
CACTTGGGTGCCATG

Expression of ANFB_HUMAN (SEQ ID NO:138) Natriuretic peptides HUMNATPEP transcripts which are detectable by amplicon as depicted in sequence name HUMNATPEPseg5 (SEQ ID NO: 150) specifically in heart tissue:

[1106] Expression of ANFB_HUMAN (SEQ ID NO:138) Natriuretic peptides transcripts detectable by or according to seg5 node, HUMNATPEPseg5 (SEQ ID NO: 150) amplicon and HUMNATPEPseg5F (SEQ ID NO: 148), HUMNATPEPseg5R (SEQ ID NO:149) primers was measured by real time PCR. In parallel the expression of four housekeeping genes—RPL19 (GenBank Accession No. NM_{—}000981 (SEQ ID NO:7); RPL19 amplicon (SEQ ID NO: 38)), TATA box (GenBank Accession No. NM_{—}003194 (SEQ ID NO:2); TATA amplicon (SEQ ID NO: 53)), Ubiquitin (GenBank Accession No. BC000449 (SEQ ID NO:9); amplicon—Ubiquitin-amplicon (SEQ ID NO:50)) and SDHA (GenBank Accession No. NM_{—}004168 (SEQ ID NO:4); amplicon—SDHA-amplicon (SEQ ID NO:29)), was measured similarly. For each RT sample, the expression of the above amplicons was normalized to the geometric mean of the quantities of the housekeeping genes. The normalized quantity of each RT sample was then divided by the median of the quantities of the heart tissue samples (Sample Nos. 44-46, Table 7 above, Tissue samples in normal panel), to obtain a value of expression for each sample relative to median of the heart tissue.

[1107] FIG. 21 is a histogram showing relative expression of the above-indicated ANFB_HUMAN (SEQ ID NO:138) Natriuretic peptides transcripts in heart tissue samples as opposed to other tissues.

[1108] As is evident from FIG. 21, the expression of ANFB_HUMAN (SEQ ID NO:138) Natriuretic peptides transcripts detectable by the above amplicon in heart tissue samples was significantly higher than in most other samples (Sample Nos. 1-9, 11-22, 24-26, 28-43, 47-74 Table 7, “Tissue samples in normal panel” above). Note that the expression of the above amplicon in one of the heart samples, sample no. 45, was higher compared to its expression in the other two heart samples (sample 44 and 46). Sample no. 45 is from fibrotic heart, and samples 44 and 46 are samples from normal hearts.

[1109] Primer pairs are also optionally and preferably encompassed within the present invention; for example, for the above experiment, the following primer pair was used as a non-limiting illustrative example only of a suitable primer pair: HUMNATPEPseg5 forward primer (SEQ ID NO: 148); and HUMNATPEPseg5 reverse primer (SEQ ID NO: 149).

[1110] The present invention also preferably encompasses any amplicon obtained through the use of any suitable primer pair; for example, for the above experiment, the following amplicon was obtained as a non-limiting illustrative example only of a suitable amplicon: HUMNATPEPseg5 (SEQ ID NO: 150).

| | |
|---|---|
| HUMNATPEPseg5 Forward primer: | (SEQ ID NO: 148) |
| CTTCCCCCATTCCAGTGTGT | |
| HUMNATPEPseg5 Reverse primer: | (SEQ ID NO: 149) |
| GAGGAAGCGATGTCCAGGTG | |
| HUMNATPEPseg5 | (SEQ ID NO: 150) |
| Amplicon: | |

CTTCCCCCATTCCAGTGTGTGACACTGTTAGAGTCACTTTGGGGTTTGTTGTCTCTGGGAACCA
CACTCTTTGAGAAAAGGTCACCTGGACATCGCTTCCTC

### Description for Cluster HUMCDDANF

[1111] Cluster HUMCDDANF features 3 transcript(s) and 10 segment(s) of interest, the names for which are given in Tables 61 and 62, respectively. The selected protein variants are given in table 63.

TABLE 61
Transcripts of interest
Transcript Name

HUMCDDANF_PEA_1_T6 (SEQ ID NO: 151)
HUMCDDANF_PEA_1_T7 (SEQ ID NO: 152)
HUMCDDANF_PEA_1_T8 (SEQ ID NO: 153)

TABLE 62
Segments of interest

Segment Name

| | |
|---|---|
| HUMCDDANF_PEA_1_node_2 (SEQ ID NO: 154) | HUMCDDANF_PEA_1_T6 (SEQ ID |
| | NO: 151), HUMCDDANF_PEA_1_T7 |
| | (SEQ ID NO: 152) and |
| | HUMCDDANF_PEA_1_T8 (SEQ ID |
| | NO: 153) |
| HUMCDDANF_PEA_1_node_4 (SEQ ID NO: 155) | HUMCDDANF_PEA_1_T7 (SEQ ID |
| | NO: 152) and HUMCDDANF_PEA_1_T8 |
| | (SEQ ID NO: 153) |
| HUMCDDANF_PEA_1_node_5 (SEQ ID NO: 156) | HUMCDDANF_PEA_1_T6 (SEQ ID |
| | NO: 151), HUMCDDANF_PEA_1_T7 |
| | (SEQ ID NO: 152) and |
| | HUMCDDANF_PEA_1_T8 (SEQ ID |
| | NO: 153) |
| HUMCDDANF_PEA_1_node_6 (SEQ ID NO: 157) | HUMCDDANF_PEA_1_T6 (SEQ ID |
| | NO: 151) and HUMCDDANF_PEA_1_T8 |
| | (SEQ ID NO: 153) |
| HUMCDDANF_PEA_1_node_7 (SEQ ID NO: 158) | HUMCDDANF_PEA_1_T6 (SEQ ID |
| | NO: 151) and HUMCDDANF_PEA_1_T8 |
| | (SEQ ID NO: 153) |
| HUMCDDANF_PEA_1_node_8 (SEQ ID NO: 159) | HUMCDDANF_PEA_1_T6 (SEQ ID |
| | NO: 151), HUMCDDANF_PEA_1_T7 |
| | (SEQ ID NO: 152) and |
| | HUMCDDANF_PEA_1_T8 (SEQ ID |
| | NO: 153) |
| HUMCDDANF_PEA_1_node_10 (SEQ ID NO: 160) | HUMCDDANF_PEA_1_T6 (SEQ ID |
| | NO: 151), HUMCDDANF_PEA_1_T7 |
| | (SEQ ID NO: 152) and |
| | HUMCDDANF_PEA_1_T8 (SEQ ID |
| | NO: 153) |
| HUMCDDANF_PEA_1_node_3 (SEQ ID NO: 161) | HUMCDDANF_PEA_1_T6 (SEQ ID |
| | NO: 151), HUMCDDANF_PEA_1_T7 |
| | (SEQ ID NO: 152) and |
| | HUMCDDANF_PEA_1_T8 (SEQ ID |
| | NO: 153) |
| HUMCDDANF_PEA_1_node_11 (SEQ ID NO: 162) | HUMCDDANF_PEA_1_T6 (SEQ ID |
| | NO: 151), HUMCDDANF_PEA_1_T7 |
| | (SEQ ID NO: 152) and |
| | HUMCDDANF_PEA_1_T8 (SEQ ID |
| | NO: 153) |
| HUMCDDANF_PEA_1_node_12 (SEQ ID NO: 163) | HUMCDDANF_PEA_1_T6 (SEQ ID |
| | NO: 151), HUMCDDANF_PEA_1_T7 |
| | (SEQ ID NO: 152) and |
| | HUMCDDANF_PEA_1_T8 (SEQ ID |
| | NO: 153) |

TABLE 63
Proteins of interest

| Protein Name | Corresponding Transcript(s) |
|---|---|
| HUMCDDANF_PEA_1_P6 (SEQ ID NO: 165) | HUMCDDANF_PEA_1_T6 (SEQ ID NO: 151) |
| HUMCDDANF_PEA_1_P9 (SEQ ID NO: 166) | HUMCDDANF_PEA_1_T7 (SEQ ID NO: 152); |
| | HUMCDDANF_PEA_1_T8 (SEQ ID NO: 153) |

[1112] These sequences are variants of the known protein Atrial natriuretic factor precursor (SEQ ID NO:164) (SwissProt accession identifier ANF_HUMAN (SEQ ID NO:164); known also according to the synonyms ANF; Atrial natriuretic peptide; ANP; Prepronatriodilatin; CDP), referred to herein as the previously known protein.

[1113] Protein Atrial natriuretic factor precursor (SEQ ID NO:164) is known or believed to have the following function(s): Atrial natriuretic factor (ANF) is a potent vasoactive substance synthesized in mammalian atria and is thought to play a key role in cardiovascular homeostasis. Has a cGMP-stimulating activity.

[1114] A-type natriuretic peptide (ANP) (also referred to as atrial natriuretic peptide, atrial natriuretic factor (ANF) or cardiodilatin (Forssmann et al Histochem Cell Biol 110: 335-357, 1998) is a 28 amino acid peptide that is synthesized, stored, and released atrial myocytes in response to atrial distension, angiotensin II stimulation, endothelin, and sympathetic stimulation (beta-adrenoceptor mediated). ANP is synthesized as a precursor molecule (pro-ANP) that is converted to an active form, ANP, by proteolytic cleavage and also forming N-terminal ANP (1-98). N-terminal ANP and ANP have been reported to increase in patients exhibiting atrial fibrillation and heart failure (Rossi et al. Journal of the American College of Cardiology 35: 1256-62, 2000). In addition to atrial natriuretic peptide (ANP99-126) itself, linear peptide fragments from its N-terminal prohormone segment are known; such fragments are also expected to occur in ANP variants according to the present invention. As the skilled artisan will recognize, however, because of its relationship to ANP variant, the concentration of N-terminal ANP variant molecule can also provide diagnostic or prognostic information in patients. The phrase “marker related to ANP variant or ANP variant related peptide” refers to any polypeptide that originates from the pro-ANP variant molecule (1-126), or a variant thereof. Proteolytic degradation of ANP variant and of peptides related to ANP variant may occur and these proteolytic fragments are also encompassed it the term “ANP variant related peptides.”

[1115] Elevated levels of ANP are found during hyperyolemia, atrial fibrillation and congestive heart failure. ANP is involved in the long-term regulation of sodium and water balance, blood volume and arterial pressure. This hormone decreases aldosterone release by the adrenal cortex, increases glomerular filtration rate (GFR), produces natriuresis and diuresis (potassium sparing), and decreases renin release thereby decreasing angiotensin II. These actions contribute to reductions in blood volume and therefore central venous pressure (CVP), cardiac output, and arterial blood pressure. Several isoforms of ANP have been identified, and their relationship to stroke incidence studied. See, e.g., Rubatu et al., Circulation 100:1722-6, 1999; Estrada et al., Am. J. Hypertens. 7:1085-9, 1994.

[1116] Chronic elevations of ANP appear to decrease arterial blood pressure primarily by decreasing systemic vascular resistance. The mechanism of systemic vasodilation may involve ANP receptor-mediated elevations in vascular smooth muscle cGMP as well as by attenuating sympathetic vascular tone. This latter mechanism may involve ANP acting upon sites within the central nervous system as well as through inhibition of norepinephrine release by sympathetic nerve terminals. ANP may be viewed as a counter-regulatory system for the renin-angiotensin system.

[1117] Known polymorphisms for this sequence are as shown in Table 64.

TABLE 64
Amino acid mutations for Known Protein

| SNP position(s) on amino | |
|---|---|
| acid sequence | Comment |
| 32 | V -> M (in dbSNP: 5063). |
| | /FTId = VAR_014579. |
| 152-153 | Missing (in isoform 2). |
| | /FTId = VAR_000594. |
| 65 | E -> D |

[1118] Protein Atrial natriuretic factor precursor (SEQ ID NO:164) localization is believed to be Secreted.

[1119] It has been investigated for clinical/therapeutic use in humans, for example as a target for an antibody or small molecule, and/or as a direct therapeutic; available information related to these investigations is as follows. Potential pharmaceutically related or therapeutically related activity or activities of the previously known protein are as follows: Aldosterone antagonist; Diuretic; Electrolyte absorption agonist. A therapeutic role for a protein represented by the cluster has been predicted. The cluster was assigned this field because there was information in the drug database or the public databases (e.g., described herein above) that this protein, or part thereof, is used or can be used for a potential therapeutic indication: Antihypertensive, diuretic; Antiasthma; Urological; Cardiostimulant.

[1120] The following GO Annotation(s) apply to the previously known protein. The following annotation(s) were found: physiological processes; blood pressure regulation, which are annotation(s) related to Biological Process; hormone, which are annotation(s) related to Molecular Function; and extracellular, which are annotation(s) related to Cellular Component.

[1121] The GO assignment relies on information from one or more of the SwissProt/TremBl Protein knowledgebase, available from <http://www.expasy.ch/sprot/>; or Locuslink, available from <http://www.ncbi.nlm.nih.gov/projects/LocusLink/>.

[1122] It should be noted that a number of diagnostic utilities are described for variants of HUMCDDANF herein; these utilities may also optionally be applied to various forms of these variants, including but not limited to, propeptides, propeptides after cleavage, biologically active peptides, and/or fragments of these variants (optionally including degradation products of these variants).

[1123] According to optional but preferred embodiments of the present invention, variants of this cluster according to the present invention (amino acid and/or nucleic acid sequences of HUMCDDANF) may optionally have one or more of the following utilities, as described with regard to the Table 65 below. It should be noted that these utilities are optionally and preferably suitable for human and non-human animals as subjects, except where otherwise noted. The reasoning is described with regard to biological and/or physiological and/or other information about the known protein, but is given to demonstrate particular diagnostic utility for the variants according to the present invention.

TABLE 65
Utilities for Variants of HUMCDDANF, related to ANP (Atrial Natriuretic Peptide/Factor,
ANF, NPPA, Prepronatriodilatin, Cardiodilatin-related peptide, CDP, ANF_HUMAN
(SEQ ID NO: 164), ANP_HUMAN)

| Diagnostic entity | Rationale | Reference |
|---|---|---|
| Administration in | In a subgroup of patients with | Vervoort et al., Am |
| diagnostic test of | uncomplicated type 1 diabetes, an increase | J Kidney Dis. 2002 |
| vascular dysfunction | in glomerular permselectivity can be | Jul; 40(1): 9-15. |
| (such as in diabetes | unmasked by the infusion of ANP. | |
| mellitus) | | |
| Assessing and | Treatment of hypertension with perindopril | Yalcin et al., Clin |
| monitoring | reduces plasma atrial natriuretic peptide | Cardiol. 2000 |
| antihypertensive therapy | levels, left ventricular mass, and improves | Jun; 23(6): 437-41 |
| | echocardiographic parameters of diastolic | |
| | function. | |
| Assessing volume | Regional stress but not myocarditis itself is | Benvenuti et al., Int |
| overload (myocardial | probably responsible for ventricular ANP | J Cardiol. 2003 |
| compromise) and | expression in myocarditis. | Mar; 88(1): 57-61 |
| prognosis in Chagas | | |
| disease (chronic | | |
| chagasic | | |
| cardiomyopathy) | | |
| Assessing volume | ANP levels are a good indicator of volume | Kula et al., Can J |
| overload in Rheumatic | overload. Drugs such as angiotensin- | Cardiol. 2003 Mar |
| Cardiac disease | converting enzyme inhibitors should be | 31; 19(4): 405-8 |
| | introduced at an early stage of rheumatic | |
| | MR because heart failure may progress | |
| | silently, even if patients are taking digoxin. | |
| Assessment of dry | Assessment of dry weight in haemodialysis | Wolfram et al., |
| weight in haemodialysis | patients by the volume markers ANP and | Nephrol Dial |
| patients | cGMP. | Transplant. 1996; 11 |
| | | Suppl 2: 28-30 |
| Diagnosis and assessing | Measurement of plasma atrial natriuretic | Weir et al., Acta |
| treatment of patent | peptide concentration has a role in predicting | Paediatr. 1992 |
| ductus arteriosus | when indomethacin treatment is indicated. | Sep; 81(9): 672-5 |
| Diagnosis and prognosis | Plasma BNP (pmol/L) and ANP (pmol/L) | Falcao et al., J |
| of CHF, cardiac | were determined in 68 hypertensive patients | Renin Angiotensin |
| hypertrophy and/or MI | with dilated cardiomyopathy, NYHA class | Aldosterone Syst. |
| | III-IV and ejection fraction (EF) < or =40%, | 2004 Sep; 5(3): 121-9; |
| | and in 26 normal controls. The patient group | Squire et al., Clin |
| | was randomly subdivided into two | Sci (Lond). 2004 |
| | subgroups of 34 patients, each treated with | Sep; 107(3): 309-16 |
| | either an angiotensin receptor blocker | |
| | (ARB), irbesartan, or an ACE inhibitor | |
| | (ACE-I), captopril. RESULTS: The mean | |
| | EF in the patient sample was 33.43 +/− 6.52% | |
| | and in the controls was 61.96 +/− 3.53% | |
| | (p = 0.000). The mean BNP (pmol/L) in | |
| | patients was 44.78 +/− 54.36 and in the | |
| | controls was 7.12 +/− 8.28 (p = 0.000) and the | |
| | mean ANP (pmol/L) was 30.32 +/− 25.97 in | |
| | patients and 11.18 +/− 7.92 in controls | |
| | (p = 0.000). A statistically significant | |
| | difference was found between patients and | |
| | healthy controls. Significant correlations | |
| | were found between natriuretic peptides and | |
| | EF. Between the baseline phase and the sixth | |
| | month, BNP and ANP decreased | |
| | significantly in the ARB group. At the sixth | |
| | month, both BNP and ANP were lower in | |
| | the ARB group. Evidence of clinical benefit | |
| | was found with both ARB and ACE-I | |
| | treatment throughout the six months, with | |
| | patients moving from classes III and IV to | |
| | class II NYHA. Improvement of EF was also | |
| | found, with transition of patients with lower | |
| | EF (even <30%) to higher values. EF was | |
| | higher in the ARB group at the sixth month. | |
| | Diagnosis using both N-ANP and N-BNP | |
| | identifies a greater number of patients at risk | |
| | of death or heart failure than either peptide | |
| | alone | |
| Diagnosis of alcohol | Although mean ANP levels increased | Kiefer et al., Acta |
| withdrawal state | significantly in alcoholics between days 1 | Psychiatr Scand. |
| | and 14, they remained diminished compared | 2002 Jan; 105(1): 65-70. |
| | to controls. Individuals in a subgroup of | Kovacs GL. Curr |
| | alcoholics with decreased ANP levels during | Med Chem. 2003 |
| | withdrawal were found to have significantly | Dec; 10(23): 2559-76. |
| | elevated scores for mean and maximum | |
| | craving and a trend to an elevated self-rated | |
| | anxiety on day 14. | |
| | In an early phase of acute withdrawal, | |
| | plasma levels of atrial natriuretic peptide | |
| | (ANP) are high. In patients with delirium | |
| | tremens (DT) elevated levels of ANP were | |
| | observed days before the actual onset of DT. | |
| | It is concluded that the altered plasma ANP | |
| | secretion might be associated with, and | |
| | therefore used as, an indicator of the onset of | |
| | DT. | |
| Diagnosis of and | High levels of 5-HIAA excretion and plasma | Zuetenhorst et al., |
| volume overload and | ANP were found to be associated with | Cancer. 2003 Apr |
| prognosis assessment in | carcinoid heart disease. | 1; 97(7): 1609-15 |
| carcinoid heart disease | | |
| Diagnosis of arrhythmia | N-ANP levels were normalized following | Erbay et al., Clin |
| and/or its risk | septal closure in most patients, except in | Sci (Lond). 2004 |
| | those with atrial fibrillation attacks | Sep; 107(3): 297-302 |
| | following corrective surgery. | |
| Diagnosis of brain | A statistically significant increase in the | Nogami et al., |
| infarction | number of ANP-immunoreactive glial cells | Histochem J. 2001 |
| | (mainly astrocytes) was observed in the | Feb; 33(2): 87-90 |
| | white matter surrounding the brain infarction | |
| | compared with the intact area. | |
| Diagnosis of cardiac | Cardiac rhabdomyomas exhibit a fetal | Benvenuti et al., |
| rhabdomyoma | pattern of atrial natriuretic peptide | Exp Mol Pathol. |
| | immunoreactivity. | 2001 Feb; 70(1): 65-9 |
| Diagnosis of | A direct contributory role of ANP in the | Rubattu et al., J |
| cerebrovascular | development of hypertension and of | Hypertens. 2001 |
| disorders or their risk | cerebrovascular disorders has been | Nov; 19(11): 1923-31 |
| | suggested by the use of molecular genetic | |
| | approaches | |
| Diagnosis of | Quantitative RT-PCR analysis showed a | Rubattu et al., J |
| Doxorubicin | selective 5-fold increase of ANP mRNA in | Hypertens. 2001 |
| cardiotoxicity | Dox-treated dog hearts in comparison to | Nov; 19(11): 1923-31 |
| | controls. Similarly, northern analysis gave a | |
| | selective 4.5-fold increase in ANP | |
| | transcripts in Dox-treated rat hearts. On the | |
| | other hand, there was a selective decrease | |
| | (approximately 39%) of ANP transcripts in | |
| | Dox-treated cardiac cultures relative to | |
| | controls. | |
| Diagnosis of early | ANP but not BNP appears to be a sensitive | Bayerle-Eder et al., |
| diastolic dysfunction | biochemical marker for early diastolic | Horm Metab Res. |
| | dysfunction in Type 1 diabetes. | 2003 |
| | | May; 35(5): 301-7 |
| Diagnosis of fetal | ANF levels in amniotic fluid and in maternal | Di Lieto et al., J |
| cardiac malformations | venous blood are increased early in the case | Matern Fetal |
| | of fetuses with cardiac malformations, with | Neonatal Med. 2002 |
| | or without associated karyotype alteration. | Mar; 11(3): 183-7 |
| | Chromosomally abnormal fetuses without | |
| | heart malformations have normal ANF | |
| | levels. | |
| Diagnosis of gastric | Atrial natriuretic peptide (ANP) is present in | Gower et al., Am J |
| pathology including | gastric mucosa. | Physiol Gastrointest |
| gastric dilatation and | | Liver Physiol. 2003 |
| gastric cancer | | Apr; 284(4): G638-45 |
| Diagnosis of low venous | Formerly preeclamptic women with a | Aardenburg et al., J |
| capacitance states, such | subnormal plasma volume differ from | Soc Gynecol |
| as may be tendency for | controls with a normal plasma volume by a | Investig. 2005 |
| preeclampsia | reduced venous capacitance. During volume | Feb; 12(2): 107-11 |
| | loading, patients differed from controls by a | |
| | larger rise in alpha-ANP, pulse rate, and | |
| | cardiac output, and by a lower estimated | |
| | venous capacitance. | |
| Diagnosis of | Immunohistochemical analysis of | Takemura et al., Int |
| myocarditis | endomyocardial biopsy specimens showed | J Cardiol. 1995 |
| | ANP and BNP immunoreactivity in the early | Dec; 52(3): 213-22 |
| | myocarditis group (ANP in 4/10 and BNP in | |
| | 3/10) and the late myocarditis group (ANP | |
| | and BNP in 4/10), but not in the controls | |
| | (0/8). | |
| Diagnosis of paroxysmal | During the onset period of Supraventricular | Schiffrin et al., N |
| atrial tachycardia | Tachycardia, plasma ET (endothelin) and | Engl J Med. 1985 |
| | ANP were markedly elevated and 30 | May |
| | minutes after its termination they were | 2; 312(18): 1196-7.; |
| | lowered significantly, but their | |
| | concentrations were still 2-fold higher than | |
| | those of the control group. | |
| Diagnosis of perinatal | Perinatal hypoxia causes ventricular | Hohimer et al., |
| hypoxia | enlargement associated with increased atrial | High Alt Med Biol. |
| | natriuretic peptide (ANP) mRNA levels in | 2003 |
| | newborn mice. | Summer; 4(2): 241-54 |
| Diagnosis of | ANP could be involved in the neovascular | Rollin et al., Mol |
| proliferative diabetic | and fibrotic complications of proliferative | Vis. 2004 Jul |
| retinopathy or its risk | diabetic retinopathy (PDR): ANP was | 15; 10: 450-7 |
| | immunohistochemically localized in the | |
| | epiretinal membranes of patients with PDR. | |
| | Vitreous ANP concentrations were | |
| | significantly higher in patients with active | |
| | PDR compared to patients with quiescent | |
| | PDR, diabetes without PDR or controls | |
| | <0.05. Significant differences were also | |
| | observed between vitreous ANP levels in | |
| | diabetic patients without PDR and control | |
| | subjects. There was no significant | |
| | correlation between serum and vitreous ANP | |
| | levels in any of the patient groups. | |
| Diagnosis of diabetic | Diabetic pregnancy is associated with lower | Rollin et al., Mol |
| pregnancy | levels of ANP compared to non-diabetic | Vis. 2004 Jul |
| | pregnancy. Levels of ANP (p = 0.03) are | 15; 10: 450-7 |
| | significantly lower in diabetes than in non- | |
| | diabetes subjects throughout pregnancy and | |
| | postpartum. | |
| Diagnosis of pulmonary | Atrial natriuretic peptide and cGMP levels | Wiedemann et al., J |
| hypertension | were increased about tenfold and fivefold | Am Coll Cardiol. |
| | compared with controls in both primary and | 2001 |
| | nonprimary pulmonary hypertension. | Oct; 38(4): 1130-6 |
| Diagnosis of radiation | Circulating levels of ANP were measured in | Wondergem et al., J |
| mediated cardiac | patients who have been irradiated on a large | Am Coll Cardiol. |
| dysfunction | part of the heart (50-80%; Hodgkin's | 2001 |
| | disease) or smaller part of the heart (20-30%; | Oct; 38(4): 1130-6 |
| | primary breast cancer). RESULTS: | |
| | ANP plasma levels of 121 patients | |
| | (Hodgkin's disease, 73 patients; breast | |
| | cancer, 48 patients) and 67 controls were | |
| | examined. ANP plasma levels of both | |
| | Hodgkin patients (28.8 +/− 2.2, P = 0.003) and | |
| | breast cancer patients (20.4 +/− 2.8 ng/l, | |
| | P = 0.01) were significantly elevated when | |
| | compared to age-matched controls (13.5 +/− | |
| | 1.2 ng/l). Patients with clinical symptoms of | |
| | cardiovascular disease (n = 25) had | |
| | significantly higher ANP plasma levels | |
| | (P < 0.001) compared to patients in the same | |
| | treatment group without evidence of cardiac | |
| | disease (50.2 +/− 7.5 vs. 23.3 +/− 1.3 ng/l, | |
| | P < 0.001, and 38.2 +/− 12.4 vs. 16.3 +/− 1.6 ng/l, | |
| | P < 0.001, for Hodgkin's disease and | |
| | breast cancer, respectively). Eight patients | |
| | suffered from essential hypertension (n = 8), | |
| | whereas the remaining group of 17 patients | |
| | showed a variety of cardiac disorders (i.e. | |
| | myocardial infarction, decreasing ventricular | |
| | function, and atrial fibrillations). | |
| Diagnosis of salt | ProANP(1-30) correlated with salt | Melander et al., |
| sensitive hypertension | sensitivity at baseline (r = 0.76, P < 0.000001), | 2002 |
| | after the low-(r = 0.80, P < 0.0000001) and | May; 39(5): 996-9 |
| | high-salt diets (r = 0.85, P < 0.00000001). | |
| | Changes in mean blood pressure (deltaMBP) | Kato N. et al. |
| | were significantly correlated with changes in | Hypertens Res. |
| | atrial natriuretic peptide during salt loading | 2002 |
| | (r = −0.34, p = 0.0018). | Nov; 25(6): 801-9. |
| Diagnosis of small cell | A tumor cell line from a patient with small | Johnson et al., |
| lung carcinoma | cell lung carcinoma and hyponatremia was | Cancer. 1997 Jan |
| | able ectopically to produce, process, and | 1; 79(1): 35-44 |
| | secrete ANP in the same immunoreactive | |
| | form as the biologically active molecule. | |
| | Preliminary studies show that tumor cell line | |
| | NCI-H1284 contains an enzyme that can | |
| | cleave precursors at the same amino acid | |
| | sequences needed to produce ANP-(S99- | |
| | Y126) from pro-ANP. | |
| Differential diagnosis of | Chronic administration of atrial natriuretic | Lee et al., J Androl. |
| male infertility | peptide reduces testosterone production of | 2003 Nov |
| | testes in mice. | Dec; 24(6): 912-7 |
| Differentiation of recent | An inverse relation was demonstrated | van den Berg et al., |
| atrial fibrillation from | between the duration of AF (atrial | Europace. 2004 |
| prolonged atrial | fibrillation) and plasma ANP concentration. | Sep; 6(5): 433-7 |
| fibrillation. Predicting | In addition, a reduced ANP response to | |
| cardioversion and/or | exercise has been shown to be predictive of | |
| maze operation success. | unsuccessful cardioversion of AF to sinus | |
| Measuring atrial | rhythm. Finally, ANP has also been shown | |
| degeneration. | to predict outcome after a maze operation. | |
| | Outcome was poor when preoperative | |
| | plasma ANP concentration was low. | |
| | Moreover, high atrial collagen content, as a | |
| | measure of atrial degeneration, correlated | |
| | with low ANP. These data indicate that ANP | |
| | may serve as a marker of atrial integrity, | |
| | which may help in selecting AF patients for | |
| | therapeutic interventions. | |
| Monitoring menstrual | The strongest ANP immunostaining was | Ivanova et al., |
| cycle and/or differential | observed in granulosa cells obtained from | Reprod Biol. 2003 |
| diagnosis of female | large follicles. The ANP immunostaining | Jul; 3(2): 173-81. |
| infertility | detected by Mab 5D3 had granular | |
| | appearance moderately expressed in the | |
| | submembrane region of granulosa cells of all | |
| | types of follicles. | |
| Prognosis in patients on | Plasma levels of the vasoactive peptides | Odar-Cederlof et |
| hemodialysis | ANP and NPY are the most important group | al., ASAIO J. 2003 |
| | in a hierarchy of variables that predict | Jan-Feb; 49(1): 74-80 |
| | imminent death in hemodialysis patients, | |
| | and NPY is associated with late death. ANP | |
| | and NPY apparently sum up the detrimental | |
| | influence of many factors in hemodialysis | |
| | patients. | |
| Prognostic marker in | Pro-atrial natriuretic peptide is a prognostic | Morgenthaler et al., |
| sepsis | marker in sepsis, similar to the APACHE II | Crit Care. 2005 |
| | score. | Feb; 9(1): R37-45. |
| | | Epub 2004 Dec 17. |
| Protection against | Preconditioning of livers with ANP | Gerwig et al., J |
| hepatic preservation | markedly reduces hepatic ischemia- | Hepatol. 2003 |
| injury in liver | reperfusion injury. Preconditioning with | Sep; 39(3): 341-8 |
| transplantation process. | both ANP and 8-Br-cGMP significantly | |
| Diagnosis of such injury | reduced caspase-3-like activity and the | |
| and/or a tendency | number of triphosphate nick-end labeling- | |
| thereto. | positive cells. After ischemia, degenerative | |
| | cell changes were clearly reduced in ANP | |
| | pretreated livers. After reperfusion, ANP | |
| | preconditioning led to a significant reduction | |
| | of necrotic hepatocytes and endothelial cells | |
| | in periportal zones. Cell proliferation was | |
| | not affected. | |
| Treatment and | Pretreatment with atrial natriuretic peptide | Strohle et al., Am J |
| prevention of panic | resulted in significantly lower Acute Panic | Psychiatry. 2001 |
| attack and anxiety | Inventory scores than pretreatment with | Sep; 158(9): 1514-6 |
| disorders. Diagnosis of | placebo. | |
| such panic attacks | Atrial natriuretic peptide (ANP) is causally | Strohle A. |
| and/or anxiety disorders, | involved in sodium lactate-induced panic | Pharmacopsychiatry |
| and/or a tendency | attacks. Furthermore, preclinical and clinical | 2003 Nov; 36 |
| thereto. | data on its anxiolytic activity suggest that | Suppl 3: S207-14. |
| | non-peptidergic ANP receptor ligands may | |
| | be of potential use in the treatment of | |
| | anxiety disorders. | |
| Treatment and/or | The suprarenal abdominal aortic cross- | Mitaka et al., Crit |
| prevention of renal | clamping during aortic aneurysm repair | Care Med. 2003 |
| failure. Including during | causes renal dysfunction after surgery. | Aug; 31(8): 2205-10 |
| surgery, such as aortic | Prophylactic continuous ANP infusion | |
| dissection repair. | limited adverse changes after aortic cross- | |
| Diagnosis of such renal | clamping in urine volume, renal blood flow, | |
| failure or a tendency | and creatinine clearance and serum | |
| thereto. | creatinine concentrations. | |
| Relation to obesity, | Atrial natriuretic peptide (ANP) is a lipolytic | Moro et al., |
| optionally including | agent on isolated human fat cells. | Metabolism. 2005 |
| particular type(s) of | | Jan; 54(1): 122-31 |
| underlying condition(s) | | |
| associated with obesity | | |
| ANP possesses anti- | ANP and its receptors have been shown to | Kiemer AK, Ann |
| inflammatory activity | be expressed and differentially regulated in | Rheum Dis. 2001 |
| and so may be a marker | the immune system, so it has been suggested | Nov; 60 Suppl |
| for inflammation | that ANP has immunomodulatory potency. | 3: iii68-70. |
| | Specifically, ANP was shown to reduce the | |
| | secretion of inflammatory mediators in | |
| | macrophages. | |

[1124] According to other optional embodiments of the present invention, variants of this cluster according to the present invention (amino acid and/or nucleic acid sequences of HUMCDDANF) may optionally have one or more of the following utilities, some of which are related to utilities described above. It should be noted that these utilities are optionally and preferably suitable for human and nonhuman animals as subjects, except where otherwise noted.

[1125] A non-limiting example of such a utility is diagnosis of stroke and cerebral injury. Optionally and preferably, a plurality of blood pressure related markers is used, including any combination of two or more of ANP (known protein and/or corresponding oligonucleotides), ANP variants according to the present invention (amino acid and/or nucleic acid sequences of HUMCDDANF), BNP (known protein and/or corresponding oligonucleotides) or BNP variants according to the present invention (amino acid and/or nucleic acid sequences of HUMNATPEP). Preferably, the combination includes at least one ANP variant and/or at least one BNP variant according to the present invention.

[1126] Optionally, the combination may include one or more markers selected from the group consisting of specific markers of neural tissue injury, markers related to coagulation and hemostasis, and markers related to inflammation, and markers related to apoptosis. These markers may optionally include one or more of VEGF or a variant thereof (as described for example in U.S. Pat. No. 6,783,954, hereby incorporated by reference as if fully set forth herein) or CRP or a variant thereof as described herein with regard to cluster HSCREACT.

[1127] Use of the known protein, ANP, for diagnosis of stroke and cerebral injury has been described in US Patent Application No. 20040219509, hereby incorporated by reference as if fully set forth herein.

[1128] According to other preferred embodiments of the present invention, there is provided another non-limiting example of such a utility, related to a method of characterizing a risk of future cerebral vasospasm in a subject suffering from a subarrachnoid hemorrhage, comprising: determining the presence or amount of a plurality of subject-derived markers in a sample obtained from the subject, wherein the plurality of markers are independently selected from the group consisting of specific markers of neural tissue injury, markers related to blood pressure regulation, markers related to inflammation, and markers related to apoptosis; and correlating the presence or amount of the plurality of markers to the risk of a future cerebral vasospasm in the subject.

[1129] Use of the known protein, ANP, for such a diagnostic utility has been described in US Patent Application No. 2004-0209307, hereby incorporated by reference as if fully set forth herein.

[1130] According to still other preferred embodiments of the present invention, there is provided another non-limiting example of such a utility, related to a diagnosis of sepsis, optionally and preferably by a pro-hormone or propeptide of HUMCDDANF (ANP variants) according to the present invention. Alternatively or additionally, the marker may be a prohormone or propeptide of HUMNATPEP (BNP variants) according to the present invention. Such a method optionally and preferably comprises a method for the differential-diagnostic early detection and detection, for the assessment of the severity, and for the assessment of the success of a therapeutic treatment of sepsis and severe infections, in particular sepsis-like systematic infections, characterized in that the content of at least one peptide prohormone variant as described herein and/or of a partial peptide derived therefrom, which is not the mature hormone obtainable from the peptide prohormone, is determined in a sample of a biological fluid of a patient, and the presence of a sepsis or sepsis-like systematic infection, its severity and/or the success of a therapeutic treatment are determined from the detected presence and/or amount of the determined peptide prohormone.

[1131] Optionally and preferably, the determination of the prohormone variant and of partial peptides derived therefrom in a serum or plasma of a patient in whom there is a risk of sepsis and in whom symptoms typical of sepsis are found is a valuable diagnostic aid for early detection, i.e. for the detection of infections which may lead to sepsis, and their differentiation from noninfectious etiologies, for the detection of the severity and for the assessment of the success of a treatment of sepsis and sepsis-like systemic infections. The determination is also valuable for diagnosis to distinguish symptoms attributable to systemic microbial infections from other symptoms of noninfectious etiology which, owing to their clinical picture, might suggest a sepsis but in reality are not attributable to a systemic microbial infection, for example from symptoms attributable to noninfectious inflammations of individual organs, to postoperative rejection reactions or cancers. Furthermore, systemic inflammations can be distinguished from local ones.

[1132] Use of the known proteins, ANP or BNP, for such a diagnostic utility has been described in US Patent Application No. 20040180396, hereby incorporated by reference as if fully set forth herein.

[1133] Yet another non-limiting example of such a utility includes predicting, detecting and monitoring treatment of cardiomyopathies and myocarditis with ANP variants and/or BNP variants according to the present invention as described herein, optionally including one or more of known ANP and/or known BNP. According to preferred embodiments of the present invention, there is provided a method of diagnosing or detecting cardiomyopathies or myocarditis in a patient following an infection. The method comprises obtaining a sample of a biological fluid from the patient, and determining the level of a ANP variant, a BNP variant, ANP, BNP or a fragment thereof, or a combination thereof (but including at least one variant according to the present invention), within the sample of body fluid. The current invention also relates to the monitoring of treatment of cardiomyopathies or myocarditis as a result of an infection, by determining the levels of these proteins and/or fragments, and/or related oligonucleotides of such variants and/or known proteins, at one or more than period prior to and optionally subsequent to, treatment. Multiple samples may optionally be taken over time to assess the effect of treatment, for example

[1134] Use of the known proteins, ANP or BNP, for such a diagnostic utility has been described in US Patent Application No. 20040132013, hereby incorporated by reference as if fully set forth herein.

[1135] Yet another non-limiting example of such a utility includes diagnosis of dyspnea, chest pain, and/or neurologic dysfunction, and/or differential diagnosis between systolic heart failure and diastolic heart failure, and/or differential diagnosis between atrial fibrillation and congestive heart failure, and/or between atrial fibrillation and myocardial infarction, using an ANP variant and/or a BNP variant according to the present invention. Optionally, one or more of vasopressin, endothelin-2, calcitonin gene related peptide, calcitonin, urotensin 2, and angiotensin 2 may be used in addition for differential diagnosis between systolic heart failure and diastolic heart failure. Optionally, one or more of free cardiac troponin I, free cardiac troponin T, cardiac troponin I in a complex comprising one or both of troponin T and troponin C, cardiac troponin T in a complex comprising one or both of troponin I and troponin C, total cardiac troponin I, total cardiac troponin T, and myoglobin may be used in addition for differential diagnosis between atrial fibrillation and myocardial infarction.

[1136] Use of the known proteins, ANP or BNP, for such a diagnostic utility has been described in US Patent Application No. 20040121343, hereby incorporated by reference as if fully set forth herein.

[1137] Yet another non-limiting example of such a utility includes diagnosis of a vascular disease including cardiovascular, stroke, pulmonary, renovascular, cerebrovascular, thrombotic or generalized arterial or venous condition or event including acute coronary syndrome (including but not limited to acute myocardial infarction, heart failure, atheromoma or a thrombotic condition), using an ANP variant and/or a BNP variant according to the present invention. Optionally, one or more of myoglobin, myosin light chain (MLC), myosin heavy chain (MHQ, total creatine kinase (CK) including CK-MB, lactate dehydrogenase (LDHH4), aspartate aminotransferase (AST), cardiac troponin I and T (cTn-1 and cTn-T, respectively) and cTn-1 and cTn-1 RNA, fatty acid binding protein (FAB protein) including FABP1 and human heart-type, glycogen phosphorylase-BB isoenzyme, a-atrial natriuretic peptide (ANP), cytoplasmic FABP, brain natriuretic peptide (BNP), adrenomedullin (ADM), low density lipoprotein (LDL), very low density lipoprotein (VLDL), high density lipoprotein (HDL) and intermediate density lipoprotein (11DL), C reactive protein (CRP), serum amyloid A, P-selectin, prostaglandins, platelet-activating factor (PAF), histamine, tumor necrosis factor a (TNFa), soluble TNF receptor 2 (sTNFR2), fibrin, fibrinogen, fibronolytic peptides, modified haemoglobin (HbAlc), ferritin, soluble intercellular adhesion molecule (ICAM) including soluble intercellular adhesion molecule-1 (ICAM1), heat shock proteins, apoB, apoA, apoE, homocysteine or parts thereof, Streptococcus sp., Porphyromonas gingivalis, Helicobacter pylori and Chlamydia pneumoniae or immunological relatives thereof, necrosis and platelet markers, leptin, vasopeptidase inhibitor of cardiac endogenous kinins, heparin, metalloproteinase-9, metalloproteinase-1 including its tissue inhibitor, angiotensin-converting enzyme, CD95/Apol/Fas, hepatocyte-63 growth factor, soluble vascular cell adhesion molecule-1 (VCAM1), plasma brain natriuretic peptide, angiotensin II type receptor, endothelial constitutive nitric oxide synthase, glycoprotein IIE genetic polymorphisms, factor V11a, thrombin, endothelin-1, cardiac myofibrillar proteins, Fas and Fas ligand, ligands thereof or binding partners thereof may be used in addition for diagnosis of such a vascular disease.

[1138] Use of the known proteins, ANP or BNP, for such a diagnostic utility has been described in PCT Application No. WO 0223191, hereby incorporated by reference as if fully set forth herein.

[1139] Yet another non-limiting example of such a utility includes diagnosis of cardiac decompensation risks, preferably in a method for identifying the risk of onset of cardiac decompensation, using an ANP variant and/or a BNP variant according to the present invention.

[1140] Use of the known proteins, ANP or BNP, for such a diagnostic utility has been described in PCT Application No. WO 03035907, hereby incorporated by reference as if fully set forth herein. Other non-limiting exemplary utilities for HUMCDDANF variants according to the present invention are described in greater detail below and also with regard to the previous section on clinical utility.

[1141] The heart-selective diagnostic marker prediction engine provided the following results with regard to cluster HUMCDDANF. Predictions were made for selective expression of transcripts of this contig in heart tissue, according to the previously described methods. The numbers on the y-axis of the first figure below refer to weighted expression of ESTs in each category, as “parts per million” (ratio of the expression of ESTs for a particular cluster to the expression of all ESTs in that category, according to parts per million).

[1142] Overall, the following results were obtained as shown with regard to the histogram in FIG. 22, concerning the number of heart-specific clones in libraries/sequences; as well as with regard to the histogram in FIG. 23, concerning the actual expression of oligonucleotides in various tissues, including heart.

[1143] This cluster was found to be selectively expressed in heart for the following reasons: in a comparison of the ratio of expression of the cluster in heart specific ESTs to the overall expression of the cluster in non-heart ESTs, which was found to be 53.5; the ratio of expression of the cluster in heart specific ESTs to the overall expression of the cluster in muscle-specific ESTs which was found to be 3833.7; and fisher exact test P-values were computed both for library and weighted clone counts to check that the counts are statistically significant, and were found to be 1.40E-245.

[1144] One particularly important measure of specificity of expression of a cluster in heart tissue is the previously described comparison of the ratio of expression of the cluster in heart as opposed to muscle. This cluster was found to be specifically expressed in heart as opposed to non-heart ESTs as described above. However, many proteins have been shown to be generally expressed at a higher level in both heart and muscle, which is less desirable. For this cluster, as described above, the ratio of expression of the cluster in heart specific ESTs to the overall expression of the cluster in muscle-specific ESTs which was found to be 53.5, which clearly supports specific expression in heart tissue.

[1145] As noted above, cluster HUMCDDANF features 3 transcript(s), which were listed in Table 61 above. These transcript(s) encode for protein(s) which are variant(s) of protein Atrial natriuretic factor precursor (SEQ ID NO:164). A description of each variant protein according to the present invention is now provided.

[1146] Variant protein HUMCDDANF_PEA_{—}1_P6 (SEQ ID NO:165) according to the present invention has an amino acid sequence; it is encoded by transcript(s) HUMCDDANF_PEA_{—}1_T6 (SEQ ID NO:151). An alignment is given to the known protein (Atrial natriuretic factor precursor (SEQ ID NO:164)) at the end of the application. One or more alignments to one or more previously published protein sequences are given in the alignment table located on the attached CDROM. A brief description of the relationship of the variant protein according to the present invention to each such aligned protein is as follows:

[1147] Comparison report between HUMCDDANF_PEA_{—}1_P6 (SEQ ID NO:165) and ANF_HUMAN (SEQ ID NO:164):

[1148] 1. An isolated chimeric polypeptide encoding for HUMCDDANF_PEA_{—}1_P6 (SEQ ID NO:165), comprising a first amino acid sequence being at least 90% homologous to MSSFSTTTVSFLLLLAFQLLGQTRANPMYNAVSNADLMDFKNLLDHLEEKMPLEDEVVPPQVLSE PNEEAGAALSPLPEVPPWTGEVSPAQRDGGALGRGPWDSSDRSALLKSKLRALLTAPRSLRRSSCF GGRMDRIGAQSGLGCNSFR corresponding to amino acids 1-150 of ANF_HUMAN (SEQ ID NO:164), which also corresponds to amino acids 1-150 of HUMCDDANF_PEA_{—}1_P6 (SEQ ID NO:165), and a second amino acid sequence being at least 70%, optionally at least 80%, preferably at least 85%, more preferably at least 90% and most preferably at least 95% homologous to a polypeptide having the sequence VRGTGDGNGMGWTLLGDTFSRKGTNAEAHSLSSFCPNTQSAPWVSGHAIYCP (SEQ ID NO: 642) corresponding to amino acids 151-202 of HUMCDDANF_PEA_{—}1_P6 (SEQ ID NO:165), wherein said first amino acid sequence and second amino acid sequence are contiguous and in a sequential order.

[1149] 2. An isolated polypeptide encoding for a tail of HUMCDDANF_PEA_{—}1_P6 (SEQ ID NO:165), comprising a polypeptide being at least 70%, optionally at least about 80%, preferably at least about 85%, more preferably at least about 90% and most preferably at least about 95% homologous to the sequence VRGTGDGNGMGWTLLGDTFSRKGTNAEAHSLSSFCPNTQSAPWVSGHAIYCP (SEQ ID NO: 642) in HUMCDDANF_PEA_{—}1_P6 (SEQ ID NO:165).

[1150] The location of the variant protein was determined according to results from a number of different software programs and analyses, including analyses from SignalP and other specialized programs. The variant protein is believed to be located as follows with regard to the cell: secreted.

[1151] The variant protein has the following domains, as determined by using InterPro. The domains are described in Table 66:

TABLE 66
InterPro domain(s)

| | | | Position(s) |
|---|---|---|---|
| InterPro ID | Domain description | Analysis type | on protein |
| IPR000663 | Natriuretic peptide | FPrintScan | 127-136, 136-145 |
| IPR002407 | Natriuretic peptide, | FPrintScan | 109-127, 11-29, |
| | atrial type | | 128-150, 32-50, |
| | | | 51-69, 72-89, |
| | | | 92-108 |
| IPR000663 | Natriuretic peptide | HMMPfam | 43-146 |
| IPR000663 | Natriuretic peptide | HMMSmart | 123-146 |
| IPR000663 | Natriuretic peptide | ScanRegExp | 130-146 |
| IPR002407 | Natriuretic peptide, | BlastProDom | 121-149 |
| | atrial type | | |
| IPR000663 | Natriuretic peptide | BlastProDom | 150-150, 26-120 |

[1152] Variant protein HUMCDDANF_PEA_{—}1_P6 (SEQ ID NO:165) is encoded by the following transcript(s): HUMCDDANF_PEA_{—}1_T6 (SEQ ID NO:151). The coding portion of transcript HUMCDDANF_PEA_{—}1_T6 (SEQ ID NO:151) starts at position 104 and ends at position 709.

[1153] Variant protein HUMCDDANF_PEA_{—}1_P9 (SEQ ID NO:166) according to the present invention has an amino acid sequence; it is encoded by transcript(s) HUMCDDANF_PEA_{—}1_T7 (SEQ ID NO:152) and HUMCDDANF_PEA_{—}1_T8 (SEQ ID NO:153). An alignment is given to the known protein (Atrial natriuretic factor precursor (SEQ ID NO:164)) at the end of the application. One or more alignments to one or more previously published protein sequences are given in the alignment table located on the attached CDROM. A brief description of the relationship of the variant protein according to the present invention to each such aligned protein is as follows:

[1154] Comparison report between HUMCDDANF_PEA_{—}1_P9 (SEQ ID NO:166) and ANF_HUMAN (SEQ ID NO:164):

[1155] 1. An isolated chimeric polypeptide encoding for HUMCDDANF_PEA_{—}1_P9 (SEQ ID NO:166), comprising a first amino acid sequence being at least 90% homologous to MSSFSTTTVSFLLLLAFQLLGQTRANPMYNAVSNADLMDFK corresponding to amino acids 1-41 of ANF_HUMAN (SEQ ID NO:164), which also corresponds to amino acids 1-41 of HUMCDDANF_PEA_{—}1_P9 (SEQ ID NO:166), and a second amino acid sequence being at least 70%, optionally at least 80%, preferably at least 85%, more preferably at least 90% and most preferably at least 95% homologous to a polypeptide having the sequence VGPGKRVQSGARGLSDAVLTPLDFLQVSEVYPFPCIFLF (SEQ ID NO: 643) corresponding to amino acids 42-80 of HUMCDDANF_PEA_{—}1_P9 (SEQ ID NO:166), wherein said first amino acid sequence and second amino acid sequence are contiguous and in a sequential order.

[1156] 2. An isolated polypeptide encoding for a tail of HUMCDDANF_PEA_{—}1_P9 (SEQ ID NO:166), comprising a polypeptide being at least 70%, optionally at least about 80%, preferably at least about 85%, more preferably at least about 90% and most preferably at least about 95% homologous to the sequence VGPGKRVQSGARGLSDAVLTPLDFLQVSEVYPFPCIFLF (SEQ ID NO: 643) in HUMCDDANF_PEA_{—}1_P9 (SEQ ID NO:166).

[1157] The location of the variant protein was determined according to results from a number of different software programs and analyses, including analyses from SignalP and other specialized programs. The variant protein is believed to be located as follows with regard to the cell: secreted.

[1158] The variant protein has the following domains, as determined by using InterPro. The domains are described in Table 67:

TABLE 67
InterPro domain(s)

| | | Analysis | Position(s) |
|---|---|---|---|
| InterPro ID | Domain description | type | on protein |
| IPR002407 | Natriuretic peptide, atrial type | FPrintScan | 11-29, 32-50 |

[1159] Variant protein HUMCDDANF_PEA_{—}1_P9 (SEQ ID NO:166) is encoded by the following transcript(s): HUMCDDANF_PEA_{—}1_T7 (SEQ ID NO:152) and HUMCDDANF_PEA_{—}1_T8 (SEQ ID NO:153).

[1160] The coding portion of transcript HUMCDDANF_PEA_{—}1_T7 (SEQ ID NO:152) starts at position 104 and ends at position 343.

### Description for Cluster HSACMHCP

[1161] Cluster HSACMHCP features 7 transcript(s) and 61 segment(s) of interest, the names for which are given in Tables 68 and 69. The selected protein variants are given in table 70.

TABLE 68
Transcripts of interest
Transcript Name

HSACMHCP_PEA_1_T2 (SEQ ID NO: 167)
HSACMHCP_PEA_1_T3 (SEQ ID NO: 168)
HSACMHCP_PEA_1_T4 (SEQ ID NO: 169)
HSACMHCP_PEA_1_T6 (SEQ ID NO: 170)
HSACMHCP_PEA_1_T7 (SEQ ID NO: 171)
HSACMHCP_PEA_1_T13 (SEQ ID NO: 172)
HSACMHCP_PEA_1_T17 (SEQ ID NO: 173)

TABLE 69
Segments of interest

| Segment Name | Corresponding Transcript(s) |
|---|---|
| HSACMHCP_PEA_1_node_20 (SEQ ID NO: 174) | HSACMHCP_PEA_1_T2 (SEQ ID |
| | NO: 167), HSACMHCP_PEA_1_T3 (SEQ |
| | ID NO: 168), HSACMHCP_PEA_1_T4 |
| | (SEQ ID NO: 169), |
| | HSACMHCP_PEA_1_T6 (SEQ ID |
| | NO: 170), HSACMHCP_PEA_1_T7 (SEQ |
| | ID NO: 171) and |
| | HSACMHCP_PEA_1_T17 (SEQ ID |
| | NO: 173) |
| HSACMHCP_PEA_1_node_22 (SEQ ID NO: 175) | HSACMHCP_PEA_1_T2 (SEQ ID |
| | NO: 167), HSACMHCP_PEA_1_T3 (SEQ |
| | ID NO: 168), HSACMHCP_PEA_1_T4 |
| | (SEQ ID NO: 169), |
| | HSACMHCP_PEA_1_T6 (SEQ ID |
| | NO: 170), HSACMHCP_PEA_1_T7 (SEQ |
| | ID NO: 171) and |
| | HSACMHCP_PEA_1_T17 (SEQ ID |
| | NO: 173) |
| HSACMHCP_PEA_1_node_25 (SEQ ID NO: 176) | HSACMHCP_PEA_1_T2 (SEQ ID |
| | NO: 167), HSACMHCP_PEA_1_T3 (SEQ |
| | ID NO: 168), HSACMHCP_PEA_1_T4 |
| | (SEQ ID NO: 169), |
| | HSACMHCP_PEA_1_T6 (SEQ ID |
| | NO: 170), HSACMHCP_PEA_1_T7 (SEQ |
| | ID NO: 171) and |
| | HSACMHCP_PEA_1_T17 (SEQ ID |
| | NO: 173) |
| HSACMHCP_PEA_1_node_43 (SEQ ID NO: 177) | HSACMHCP_PEA_1_T2 (SEQ ID |
| | NO: 167), HSACMHCP_PEA_1_T3 (SEQ |
| | ID NO: 168), HSACMHCP_PEA_1_T4 |
| | (SEQ ID NO: 169), |
| | HSACMHCP_PEA_1_T6 (SEQ ID |
| | NO: 170), HSACMHCP_PEA_1_T7 (SEQ |
| | ID NO: 171) and |
| | HSACMHCP_PEA_1_T17 (SEQ ID |
| | NO: 173) |
| HSACMHCP_PEA_1_node_45 (SEQ ID NO: 178) | HSACMHCP_PEA_1_T2 (SEQ ID |
| | NO: 167), HSACMHCP_PEA_1_T3 (SEQ |
| | ID NO: 168), HSACMHCP_PEA_1_T4 |
| | (SEQ ID NO: 169), |
| | HSACMHCP_PEA_1_T6 (SEQ ID |
| | NO: 170), HSACMHCP_PEA_1_T7 (SEQ |
| | ID NO: 171) and |
| | HSACMHCP_PEA_1_T17 (SEQ ID |
| | NO: 173) |
| HSACMHCP_PEA_1_node_46 (SEQ ID NO: 179) | HSACMHCP_PEA_1_T17 (SEQ ID |
| | NO: 173) |
| HSACMHCP_PEA_1_node_48 (SEQ ID NO: 180) | HSACMHCP_PEA_1_T13 (SEQ ID |
| | NO: 172) |
| HSACMHCP_PEA_1_node_49 (SEQ ID NO: 181) | HSACMHCP_PEA_1_T2 (SEQ ID |
| | NO: 167), HSACMHCP_PEA_1_T3 (SEQ |
| | ID NO: 168), HSACMHCP_PEA_1_T4 |
| | (SEQ ID NO: 169), |
| | HSACMHCP_PEA_1_T6 (SEQ ID |
| | NO: 170), HSACMHCP_PEA_1_T7 (SEQ |
| | ID NO: 171) and |
| | HSACMHCP_PEA_1_T13 (SEQ ID |
| | NO: 172) |
| HSACMHCP_PEA_1_node_57 (SEQ ID NO: 182) | HSACMHCP_PEA_1_T2 (SEQ ID |
| | NO: 167), HSACMHCP_PEA_1_T3 (SEQ |
| | ID NO: 168), HSACMHCP_PEA_1_T4 |
| | (SEQ ID NO: 169), |
| | HSACMHCP_PEA_1_T6 (SEQ ID |
| | NO: 170), HSACMHCP_PEA_1_T7 (SEQ |
| | ID NO: 171) and |
| | HSACMHCP_PEA_1_T13 (SEQ ID |
| | NO: 172) |
| HSACMHCP_PEA_1_node_59 (SEQ ID NO: 183) | HSACMHCP_PEA_1_T2 (SEQ ID |
| | NO: 167), HSACMHCP_PEA_1_T3 (SEQ |
| | ID NO: 168), HSACMHCP_PEA_1_T4 |
| | (SEQ ID NO: 169), |
| | HSACMHCP_PEA_1_T6 (SEQ ID |
| | NO: 170), HSACMHCP_PEA_1_T7 (SEQ |
| | ID NO: 171) and |
| | ID NO: 168), HSACMHCP_PEA_1_T4 |
| | (SEQ ID NO: 169), |
| | HSACMHCP_PEA_1_T6 (SEQ ID |
| | NO: 170), HSACMHCP_PEA_1_T7 (SEQ |
| | ID NO: 171) and |
| | HSACMHCP_PEA_1_T13 (SEQ ID |
| | NO: 172) |
| HSACMHCP_PEA_1_node_81 (SEQ ID NO: 189) | HSACMHCP_PEA_1_T3 (SEQ ID |
| | NO: 168) |
| HSACMHCP_PEA_1_node_87 (SEQ ID NO: 190) | HSACMHCP_PEA_1_T2 (SEQ ID |
| | NO: 167), HSACMHCP_PEA_1_T3 (SEQ |
| | ID NO: 168), HSACMHCP_PEA_1_T4 |
| | (SEQ ID NO: 169), |
| | HSACMHCP_PEA_1_T6 (SEQ ID |
| | NO: 170), HSACMHCP_PEA_1_T7 (SEQ |
| | ID NO: 171) and |
| | HSACMHCP_PEA_1_T13 (SEQ ID |
| | NO: 172) |
| HSACMHCP_PEA_1_node_89 (SEQ ID NO: 191) | HSACMHCP_PEA_1_T2 (SEQ ID |
| | NO: 167), HSACMHCP_PEA_1_T3 (SEQ |
| | ID NO: 168), HSACMHCP_PEA_1_T4 |
| | (SEQ ID NO: 169), |
| | HSACMHCP_PEA_1_T6 (SEQ ID |
| | NO: 170), HSACMHCP_PEA_1_T7 (SEQ |
| | ID NO: 171) and |
| | HSACMHCP_PEA_1_T13 (SEQ ID |
| | NO: 172) |
| HSACMHCP_PEA_1_node_96 (SEQ ID NO: 192) | HSACMHCP_PEA_1_T2 (SEQ ID |
| | NO: 167), HSACMHCP_PEA_1_T3 (SEQ |
| | ID NO: 168), HSACMHCP_PEA_1_T4 |
| | (SEQ ID NO: 169), |
| | HSACMHCP_PEA_1_T6 (SEQ ID |
| | NO: 170), HSACMHCP_PEA_1_T7 (SEQ |
| | ID NO: 171) and |
| | HSACMHCP_PEA_1_T13 (SEQ ID |
| | NO: 172) |
| HSACMHCP_PEA_1_node_97 (SEQ ID NO: 193) | HSACMHCP_PEA_1_T2 (SEQ ID |
| | NO: 167), HSACMHCP_PEA_1_T3 (SEQ |
| | ID NO: 168), HSACMHCP_PEA_1_T4 |
| | (SEQ ID NO: 169), |
| | HSACMHCP_PEA_1_T6 (SEQ ID |
| | NO: 170), HSACMHCP_PEA_1_T7 (SEQ |
| | ID NO: 171) and |
| | HSACMHCP_PEA_1_T13 (SEQ ID |
| | NO: 172) |
| HSACMHCP_PEA_1_node_100 (SEQ ID NO: 194) | HSACMHCP_PEA_1_T2 (SEQ ID |
| | NO: 167), HSACMHCP_PEA_1_T3 (SEQ |
| | ID NO: 168), HSACMHCP_PEA_1_T4 |
| | (SEQ ID NO: 169), |
| | HSACMHCP_PEA_1_T6 (SEQ ID |
| | NO: 170), HSACMHCP_PEA_1_T7 (SEQ |
| | ID NO: 171) and |
| | HSACMHCP_PEA_1_T13 (SEQ ID |
| | NO: 172) |
| HSACMHCP_PEA_1_node_105 (SEQ ID NO: 195) | HSACMHCP_PEA_1_T7 (SEQ ID |
| | NO: 171) |
| HSACMHCP_PEA_1_node_106 (SEQ ID NO: 196) | HSACMHCP_PEA_1_T2 (SEQ ID |
| | NO: 167), HSACMHCP_PEA_1_T3 (SEQ |
| | ID NO: 168), HSACMHCP_PEA_1_T4 |
| | (SEQ ID NO: 169), |
| | HSACMHCP_PEA_1_T6 (SEQ ID |
| | NO: 170), HSACMHCP_PEA_1_T7 (SEQ |
| | ID NO: 171) and |
| | HSACMHCP_PEA_1_T13 (SEQ ID |
| | NO: 172) |
| HSACMHCP_PEA_1_node_107 (SEQ ID NO: 197) | HSACMHCP_PEA_1_T2 (SEQ ID |
| | NO: 167), HSACMHCP_PEA_1_T6 (SEQ |
| | ID NO: 170) and HSACMHCP_PEA_1_T7 |
| | (SEQ ID NO: 171) |
| HSACMHCP_PEA_1_node_108 (SEQ ID NO: 198) | HSACMHCP_PEA_1_T2 (SEQ ID |
| | NO: 167) and HSACMHCP_PEA_1_T7 |
| | (SEQ ID NO: 171) |
| HSACMHCP_PEA_1_node_111 (SEQ ID NO: 199) | HSACMHCP_PEA_1_T2 (SEQ ID |
| | NO: 167), HSACMHCP_PEA_1_T3 (SEQ |
| | ID NO: 168), HSACMHCP_PEA_1_T4 |
| | (SEQ ID NO: 169), |
| | HSACMHCP_PEA_1_T6 (SEQ ID |
| | NO: 170), HSACMHCP_PEA_1_T7 (SEQ |
| | ID NO: 171) and |
| | HSACMHCP_PEA_1_T13 (SEQ ID |
| | NO: 172) |
| HSACMHCP_PEA_1_node_113 (SEQ ID NO: 200) | HSACMHCP_PEA_1_T2 (SEQ ID |
| | NO: 167), HSACMHCP_PEA_1_T3 (SEQ |
| | ID NO: 168), HSACMHCP_PEA_1_T4 |
| | (SEQ ID NO: 169), |
| | HSACMHCP_PEA_1_T6 (SEQ ID |
| | NO: 170), HSACMHCP_PEA_1_T7 (SEQ |
| | ID NO: 171) and |
| | HSACMHCP_PEA_1_T13 (SEQ ID |
| | NO: 172) |
| HSACMHCP_PEA_1_node_16 (SEQ ID NO: 201) | HSACMHCP_PEA_1_T2 (SEQ ID |
| | NO: 167), HSACMHCP_PEA_1_T3 (SEQ |
| | ID NO: 168), HSACMHCP_PEA_1_T4 |
| | (SEQ ID NO: 169), |
| | HSACMHCP_PEA_1_T6 (SEQ ID |
| | NO: 170), HSACMHCP_PEA_1_T7 (SEQ |
| | ID NO: 171) and |
| | HSACMHCP_PEA_1_T17 (SEQ ID |
| | NO: 173) |
| HSACMHCP_PEA_1_node_18 (SEQ ID NO: 202) | HSACMHCP_PEA_1_T2 (SEQ ID |
| | NO: 167), HSACMHCP_PEA_1_T3 (SEQ |
| | ID NO: 168), HSACMHCP_PEA_1_T4 |
| | (SEQ ID NO: 169), |
| | HSACMHCP_PEA_1_T6 (SEQ ID |
| | NO: 170), HSACMHCP_PEA_1_T7 (SEQ |
| | ID NO: 171) and |
| | HSACMHCP_PEA_1_T17 (SEQ ID |
| | NO: 173) |
| HSACMHCP_PEA_1_node_23 (SEQ ID NO: 203) | HSACMHCP_PEA_1_T2 (SEQ ID |
| | NO: 167), HSACMHCP_PEA_1_T3 (SEQ |
| | ID NO: 168), HSACMHCP_PEA_1_T4 |
| | (SEQ ID NO: 169), |
| | HSACMHCP_PEA_1_T6 (SEQ ID |
| | NO: 170), HSACMHCP_PEA_1_T7 (SEQ |
| | ID NO: 171) and |
| | HSACMHCP_PEA_1_T17 (SEQ ID |
| | NO: 173) |
| HSACMHCP_PEA_1_node_27 (SEQ ID NO: 204) | HSACMHCP_PEA_1_T2 (SEQ ID |
| | NO: 167), HSACMHCP_PEA_1_T3 (SEQ |
| | ID NO: 168), HSACMHCP_PEA_1_T4 |
| | (SEQ ID NO: 169), |
| | HSACMHCP_PEA_1_T6 (SEQ ID |
| | NO: 170), HSACMHCP_PEA_1_T7 (SEQ |
| | ID NO: 171) and |
| | HSACMHCP_PEA_1_T17 (SEQ ID |
| | NO: 173) |
| HSACMHCP_PEA_1_node_29 (SEQ ID NO: 205) | HSACMHCP_PEA_1_T2 (SEQ ID |
| | NO: 167), HSACMHCP_PEA_1_T3 (SEQ |
| | ID NO: 168), HSACMHCP_PEA_1_T4 |
| | (SEQ ID NO: 169), |
| | HSACMHCP_PEA_1_T6 (SEQ ID |
| | NO: 170), HSACMHCP_PEA_1_T7 (SEQ |
| | ID NO: 171) and |
| | HSACMHCP_PEA_1_T17 (SEQ ID |
| | NO: 173) |
| HSACMHCP_PEA_1_node_31 (SEQ ID NO: 206) | HSACMHCP_PEA_1_T2 (SEQ ID |
| | NO: 167), HSACMHCP_PEA_1_T3 (SEQ |
| | ID NO: 168), HSACMHCP_PEA_1_T4 |
| | (SEQ ID NO: 169), |
| | HSACMHCP_PEA_1_T6 (SEQ ID |
| | NO: 170), HSACMHCP_PEA_1_T7 (SEQ |
| | ID NO: 171) and |
| | HSACMHCP_PEA_1_T17 (SEQ ID |
| | NO: 173) |
| HSACMHCP_PEA_1_node_33 (SEQ ID NO: 207) | HSACMHCP_PEA_1_T2 (SEQ ID |
| | NO: 167), HSACMHCP_PEA_1_T3 (SEQ |
| | ID NO: 168), HSACMHCP_PEA_1_T4 |
| | (SEQ ID NO: 169), |
| | HSACMHCP_PEA_1_T6 (SEQ ID |
| | NO: 170), HSACMHCP_PEA_1_T7 (SEQ |
| | ID NO: 171) and |
| | HSACMHCP_PEA_1_T17 (SEQ ID |
| | NO: 173) |
| HSACMHCP_PEA_1_node_35 (SEQ ID NO: 208) | HSACMHCP_PEA_1_T2 (SEQ ID |
| | NO: 167), HSACMHCP_PEA_1_T3 (SEQ |
| | ID NO: 168), HSACMHCP_PEA_1_T4 |
| | (SEQ ID NO: 169), |
| | HSACMHCP_PEA_1_T6 (SEQ ID |
| | NO: 170), HSACMHCP_PEA_1_T7 (SEQ |
| | ID NO: 171) and |
| | HSACMHCP_PEA_1_T17 (SEQ ID |
| | NO: 173) |
| HSACMHCP_PEA_1_node_37 (SEQ ID NO: 209) | HSACMHCP_PEA_1_T2 (SEQ ID |
| | NO: 167), HSACMHCP_PEA_1_T3 (SEQ |
| | ID NO: 168), HSACMHCP_PEA_1_T4 |
| | (SEQ ID NO: 169), |
| | HSACMHCP_PEA_1_T6 (SEQ ID |
| | NO: 170), HSACMHCP_PEA_1_T7 (SEQ |
| | ID NO: 171) and |
| | HSACMHCP_PEA_1_T17 (SEQ ID |
| | NO: 173) |
| HSACMHCP_PEA_1_node_39 (SEQ ID NO: 210) | HSACMHCP_PEA_1_T2 (SEQ ID |
| | NO: 167), HSACMHCP_PEA_1_T3 (SEQ |
| | ID NO: 168), HSACMHCP_PEA_1_T4 |
| | (SEQ ID NO: 169), |
| | HSACMHCP_PEA_1_T6 (SEQ ID |
| | NO: 170), HSACMHCP_PEA_1_T7 (SEQ |
| | ID NO: 171) and |
| | HSACMHCP_PEA_1_T17 (SEQ ID |
| | NO: 173) |
| HSACMHCP_PEA_1_node_40 (SEQ ID NO: 211) | HSACMHCP_PEA_1_T2 (SEQ ID |
| | NO: 167), HSACMHCP_PEA_1_T3 (SEQ |
| | ID NO: 168), HSACMHCP_PEA_1_T4 |
| | (SEQ ID NO: 169), |
| | HSACMHCP_PEA_1_T6 (SEQ ID |
| | NO: 170), HSACMHCP_PEA_1_T7 (SEQ |
| | ID NO: 171) and |
| | HSACMHCP_PEA_1_T17 (SEQ ID |
| | NO: 173) |
| HSACMHCP_PEA_1_node_51 (SEQ ID NO: 212) | HSACMHCP_PEA_1_T2 (SEQ ID |
| | NO: 167), HSACMHCP_PEA_1_T3 (SEQ |
| | ID NO: 168), HSACMHCP_PEA_1_T4 |
| | (SEQ ID NO: 169), |
| | HSACMHCP_PEA_1_T6 (SEQ ID |
| | NO: 170), HSACMHCP_PEA_1_T7 (SEQ |
| | ID NO: 171) and |
| | HSACMHCP_PEA_1_T13 (SEQ ID |
| | NO: 172) |
| HSACMHCP_PEA_1_node_53 (SEQ ID NO: 213) | HSACMHCP_PEA_1_T2 (SEQ ID |
| | NO: 167), HSACMHCP_PEA_1_T3 (SEQ |
| | ID NO: 168), HSACMHCP_PEA_1_T4 |
| | (SEQ ID NO: 169), |
| | HSACMHCP_PEA_1_T6 (SEQ ID |
| | NO: 170), HSACMHCP_PEA_1_T7 (SEQ |
| | ID NO: 171) and |
| | HSACMHCP_PEA_1_T13 (SEQ ID |
| | NO: 172) |
| HSACMHCP_PEA_1_node_55 (SEQ ID NO: 214) | HSACMHCP_PEA_1_T2 (SEQ ID |
| | NO: 167), HSACMHCP_PEA_1_T3 (SEQ |
| | ID NO: 168), HSACMHCP_PEA_1_T4 |
| | (SEQ ID NO: 169), |
| | HSACMHCP_PEA_1_T6 (SEQ ID |
| | NO: 170), HSACMHCP_PEA_1_T7 (SEQ |
| | ID NO: 171) and |
| | HSACMHCP_PEA_1_T13 (SEQ ID |
| | NO: 172) |
| HSACMHCP_PEA_1_node_69 (SEQ ID NO: 215) | HSACMHCP_PEA_1_T2 (SEQ ID |
| | NO: 167), HSACMHCP_PEA_1_T3 (SEQ |
| | ID NO: 168), HSACMHCP_PEA_1_T4 |
| | (SEQ ID NO: 169), |
| | HSACMHCP_PEA_1_T6 (SEQ ID |
| | NO: 170), HSACMHCP_PEA_1_T7 (SEQ |
| | ID NO: 171) and |
| | HSACMHCP_PEA_1_T13 (SEQ ID |
| | NO: 172) |
| HSACMHCP_PEA_1_node_72 (SEQ ID NO: 216) | HSACMHCP_PEA_1_T2 (SEQ ID |
| | NO: 167), HSACMHCP_PEA_1_T3 (SEQ |
| | ID NO: 168), HSACMHCP_PEA_1_T4 |
| | (SEQ ID NO: 169), |
| | HSACMHCP_PEA_1_T6 (SEQ ID |
| | NO: 170), HSACMHCP_PEA_1_T7 (SEQ |
| | ID NO: 171) and |
| | HSACMHCP_PEA_1_T13 (SEQ ID |
| | NO: 172) |
| HSACMHCP_PEA_1_node_73 (SEQ ID NO: 217) | HSACMHCP_PEA_1_T2 (SEQ ID |
| | NO: 167), HSACMHCP_PEA_1_T3 (SEQ |
| | ID NO: 168), HSACMHCP_PEA_1_T4 |
| | (SEQ ID NO: 169), |
| | HSACMHCP_PEA_1_T6 (SEQ ID |
| | NO: 170), HSACMHCP_PEA_1_T7 (SEQ |
| | ID NO: 171) and |
| | HSACMHCP_PEA_1_T13 (SEQ ID |
| | NO: 172) |
| HSACMHCP_PEA_1_node_74 (SEQ ID NO: 218) | HSACMHCP_PEA_1_T2 (SEQ TD |
| | NO: 167), HSACMHCP_PEA_1_T3 (SEQ |
| | ID NO: 168), HSACMHCP_PEA_1_T4 |
| | (SEQ ID NO: 169), |
| | HSACMHCP_PEA_1_T6 (SEQ ID |
| | NO: 170), HSACMHCP_PEA_1_T7 (SEQ |
| | ID NO: 171) and |
| | HSACMHCP_PEA_1_T13 (SEQ ID |
| | NO: 172) |
| HSACMHCP_PEA_1_node_77 (SEQ ID NO: 219) | HSACMHCP_PEA_1_T2 (SEQ ID |
| | NO: 167), HSACMHCP_PEA_1_T3 (SEQ |
| | ID NO: 168), HSACMHCP_PEA_1_T4 |
| | (SEQ ID NO: 169), |
| | HSACMHCP_PEA_1_T6 (SEQ ID |
| | NO: 170), HSACMHCP_PEA_1_T7 (SEQ |
| | ID NO: 171) and |
| | HSACMHCP_PEA_1_T13 (SEQ ID |
| | NO: 172) |
| HSACMHCP_PEA_1_node_78 (SEQ ID NO: 220) | HSACMHCP_PEA_1_T2 (SEQ ID |
| | NO: 167), HSACMHCP_PEA_1_T3 (SEQ |
| | ID NO: 168), HSACMHCP_PEA_1_T4 |
| | (SEQ ID NO: 169), |
| | HSACMHCP_PEA_1_T6 (SEQ ID |
| | NO: 170), HSACMHCP_PEA_1_T7 (SEQ |
| | ID NO: 171) and |
| | HSACMHCP_PEA_1_T13 (SEQ ID |
| | NO: 172) |
| HSACMHCP_PEA_1_node_80 (SEQ ID NO: 221) | HSACMHCP_PEA_1_T2 (SEQ ID |
| | NO: 167), HSACMHCP_PEA_1_T3 (SEQ |
| | ID NO: 168), HSACMHCP_PEA_1_T4 |
| | (SEQ ID NO: 169), |
| | HSACMHCP_PEA_1_T6 (SEQ ID |
| | NO: 170), HSACMHCP_PEA_1_T7 (SEQ |
| | ID NO: 171) and |
| | HSACMHCP_PEA_1_T13 (SEQ ID |
| | NO: 172) |
| HSACMHCP_PEA_1_node_82 (SEQ ID NO: 222) | HSACMHCP_PEA_1_T2 (SEQ ID |
| | NO: 167), HSACMHCP_PEA_1_T3 (SEQ |
| | ID NO: 168), HSACMHCP_PEA_1_T4 |
| | (SEQ ID NO: 169), |
| | HSACMHCP_PEA_1_T6 (SEQ ID |
| | NO: 170), HSACMHCP_PEA_1_T7 (SEQ |
| | ID NO: 171) and |
| | HSACMHCP_PEA_1_T13 (SEQ ID |
| | NO: 172) |
| HSACMHCP_PEA_1_node_83 (SEQ ID NO: 223) | HSACMHCP_PEA_1_T2 (SEQ ID |
| | NO: 167), HSACMHCP_PEA_1_T3 (SEQ |
| | ID NO: 168), HSACMHCP_PEA_1_T4 |
| | (SEQ ID NO: 169), |
| | HSACMHCP_PEA_1_T6 (SEQ ID |
| | NO: 170), HSACMHCP_PEA_1_T7 (SEQ |
| | ID NO: 171) and |
| | HSACMHCP_PEA_1_T13 (SEQ ID |
| | NO: 172) |
| HSACMHCP_PEA_1_node_84 (SEQ ID NO: 224) | HSACMHCP_PEA_1_T2 (SEQ ID |
| | NO: 167), HSACMHCP_PEA_1_T3 (SEQ |
| | ID NO: 168), HSACMHCP_PEA_1_T4 |
| | (SEQ ID NO: 169), |
| | HSACMHCP_PEA_1_T6 (SEQ ID |
| | NO: 170), HSACMHCP_PEA_1_T7 (SEQ |
| | ID NO: 171) and |
| | HSACMHCP_PEA_1_T13 (SEQ ID |
| | NO: 172) |
| HSACMHCP_PEA_1_node_85 (SEQ ID NO: 225) | HSACMHCP_PEA_1_T2 (SEQ ID |
| | NO: 167), HSACMHCP_PEA_1_T3 (SEQ |
| | ID NO: 168), HSACMHCP_PEA_1_T4 |
| | (SEQ ID NO: 169), |
| | HSACMHCP_PEA_1_T6 (SEQ ID |
| | NO: 170), HSACMHCP_PEA_1_T7 (SEQ |
| | ID NO: 171) and |
| | HSACMHCP_PEA_1_T13 (SEQ ID |
| | NO: 172) |
| HSACMHCP_PEA_1_node_90 (SEQ ID NO: 226) | HSACMHCP_PEA_1_T4 (SEQ ID |
| | NO: 169) |
| HSACMHCP_PEA_1_node_91 (SEQ ID NO: 227) | HSACMHCP_PEA_1_T2 (SEQ ID |
| | NO: 167), HSACMHCP_PEA_1_T3 (SEQ |
| | ID NO: 168), HSACMHCP_PEA_1_T4 |
| | (SEQ ID NO: 169), |
| | HSACMHCP_PEA_1_T6 (SEQ ID |
| | NO: 170), HSACMHCP_PEA_1_T7 (SEQ |
| | ID NO: 171) and |
| | HSACMHCP_PEA_1_T13 (SEQ ID |
| | NO: 172) |
| HSACMHCP_PEA_1_node_92 (SEQ ID NO: 228) | HSACMHCP_PEA_1_T2 (SEQ ID |
| | NO: 167), HSACMHCP_PEA_1_T3 (SEQ |
| | ID NO: 168), HSACMHCP_PEA_1_T4 |
| | (SEQ ID NO: 169), |
| | HSACMHCP_PEA_1_T6 (SEQ ID |
| | NO: 170), HSACMHCP_PEA_1_T7 (SEQ |
| | ID NO: 171) and |
| | HSACMHCP_PEA_1_T13 (SEQ ID |
| | NO: 172) |
| HSACMHCP_PEA_1_node_93 (SEQ ID NO: 229) | HSACMHCP_PEA_1_T2 (SEQ ID |
| | NO: 167), HSACMHCP_PEA_1_T3 (SEQ |
| | ID NO: 168), HSACMHCP_PEA_1_T4 |
| | (SEQ ID NO: 169), |
| | HSACMHCP_PEA_1_T6 (SEQ ID |
| | NO: 170), HSACMHCP_PEA_1_T7 (SEQ |
| | ID NO: 171) and |
| | HSACMHCP_PEA_1_T13 (SEQ ID |
| | NO: 172) |
| HSACMHCP_PEA_1_node_95 (SEQ ID NO: 230) | HSACMHCP_PEA_1_T2 (SEQ ID |
| | NO: 167), HSACMHCP_PEA_1_T3 (SEQ |
| | ID NO: 168), HSACMHCP_PEA_1_T4 |
| | (SEQ ID NO: 169), |
| | HSACMHCP_PEA_1_T6 (SEQ ID |
| | NO: 170), HSACMHCP_PEA_1_T7 (SEQ |
| | ID NO: 171) and |
| | HSACMHCP_PEA_1_T13 (SEQ ID |
| | NO: 172) |
| HSACMHCP_PEA_1_node_98 (SEQ ID NO: 231) | HSACMHCP_PEA_1_T2 (SEQ ID |
| | NO: 167), HSACMHCP_PEA_1_T3 (SEQ |
| | ID NO: 168), HSACMHCP_PEA_1_T4 |
| | (SEQ ID NO: 169), |
| | HSACMHCP_PEA_1_T6 (SEQ ID |
| | NO: 170), HSACMHCP_PEA_1_T7 (SEQ |
| | ID NO: 171) and |
| | HSACMHCP_PEA_1_T13 (SEQ ID |
| | NO: 172) |
| HSACMHCP_PEA_1_node_103 (SEQ ID NO: 232) | HSACMHCP_PEA_1_T2 (SEQ ID |
| | NO: 167), HSACMHCP_PEA_1_T3 (SEQ |
| | ID NO: 168), HSACMHCP_PEA_1_T4 |
| | (SEQ ID NO: 169), |
| | HSACMHCP_PEA_1_T6 (SEQ ID |
| | NO: 170), HSACMHCP_PEA_1_T7 (SEQ |
| | ID NO: 171) and |
| | HSACMHCP_PEA_1_T13 (SEQ ID |
| | NO: 172) |
| HSACMHCP_PEA_1_node_104 (SEQ ID NO: 233) | HSACMHCP_PEA_1_T2 (SEQ ID |
| | NO: 167), HSACMHCP_PEA_1_T3 (SEQ |
| | ID NO: 168), HSACMHCP_PEA_1_T4 |
| | (SEQ ID NO: 169), |
| | HSACMHCP_PEA_1_T6 (SEQ ID |
| | NO: 170), HSACMHCP_PEA_1_T7 (SEQ |
| | ID NO: 171) and |
| | HSACMHCP_PEA_1_T13 (SEQ ID |
| | NO: 172) |
| HSACMHCP_PEA_1_node_109 (SEQ ID NO: 234) | HSACMHCP_PEA_1_T2 (SEQ ID |
| | NO: 167), HSACMHCP_PEA_1_T3 (SEQ |
| | ID NO: 168), HSACMHCP_PEA_1_T4 |
| | (SEQ ID NO: 169), |
| | HSACMHCP_PEA_1_T6 (SEQ ID |
| | NO: 170), HSACMHCP_PEA_1_T7 (SEQ |
| | ID NO: 171) and |
| | HSACMHCP_PEA_1_T13 (SEQ ID |
| | NO: 172) |

TABLE 70
Proteins of interest

| Protein Name | Corresponding Transcript(s) |
|---|---|
| HSACMHCP_PEA_1_P2 (SEQ ID NO: 239) | HSACMHCP_PEA_1_T2 (SEQ ID NO: 167); |
| | HSACMHCP_PEA_1_T6 (SEQ ID NO: 170) |
| HSACMHCP_PEA_1_P3 (SEQ ID NO: 240) | HSACMHCP_PEA_1_T3 (SEQ ID NO: 168) |
| HSACMHCP_PEA_1_P4 (SEQ ID NO: 241) | HSACMHCP_PEA_1_T4 (SEQ ID NO: 169) |
| HSACMHCP_PEA_1_P6 (SEQ ID NO: 242) | HSACMHCP_PEA_1_T7 (SEQ ID NO: 171) |
| HSACMHCP_PEA_1_P12 (SEQ ID NO: 243) | HSACMHCP_PEA_1_T13 (SEQ ID NO: 172) |
| HSACMHCP_PEA_1_P16 (SEQ ID NO: 244) | HSACMHCP_PEA_1_T17 (SEQ ID NO: 173) |

[1162] These sequences are variants of the known protein Myosin heavy chain (SEQ ID NO:235), cardiac muscle alpha isoform (SwissProt accession identifier MYH6_HUMAN (SEQ ID NO:235); known also according to the synonyms MyHC-alpha), referred to herein as the previously known protein.

[1163] Protein Myosin heavy chain (SEQ ID NO:235), cardiac muscle alpha isoform is known or believed to have the following function(s): Muscle contraction. Known polymorphisms for this sequence are as shown in Table 71.

TABLE 71
Amino acid mutations for Known Protein

| SNP position(s) on amino | |
|---|---|
| acid sequence | Comment |
| 88 | Q -> E |
| 574 | Q -> P |
| 608 | A -> G |
| 744 | T -> A |
| 790 | M -> I |
| 1014 | V -> A |
| 1021 | S -> T |
| 1101 | A -> V |
| 1290 | A -> S |
| 1373 | W -> C |
| 1533 | K -> N |
| 1540 | L -> M |
| 1577-1578 | KL -> NV |
| 1705-1706 | EQ -> DR |
| 1733 | E -> D |
| 1734 | A -> S |
| 1737 | T -> S |
| 1763 | D -> H |
| 1788 | M -> I |
| 1871 | D -> N |
| 1882 | R -> G |
| 1890 | Q -> R |
| 1933 | Missing |

[1164] Protein Myosin heavy chain (SEQ ID NO:235), cardiac muscle alpha isoform localization is believed to be Thick filaments of the myofibrils.

[1165] The following GO Annotation(s) apply to the previously known protein. The following annotation(s) were found: muscle contraction; striated muscle contraction; muscle development, which are annotation(s) related to Biological Process; microfilament motor; actin binding; calmodulin binding; ATP binding, which are annotation(s) related to Molecular Function; and muscle myosin; muscle thick filament; myosin, which are annotation(s) related to Cellular Component.

[1166] The GO assignment relies on information from one or more of the SwissProt/TremBl Protein knowledgebase, available from <http://www.expasy.ch/sprot/>; or Locuslink, available from <http://www.ncbi.nlm.nih.gov/projects/LocusLink/>.

[1167] According to optional but preferred embodiments of the present invention, variants of this cluster according to the present invention (amino acid and/or nucleic acid sequences of HSACMHCP may optionally have one or more of the following utilities, as described with regard to the Table 72 below. It should be noted that these utilities are optionally and preferably suitable for human and non-human animals as subjects, except where otherwise noted. The reasoning is described with regard to biological and/or physiological and/or other information about the known protein, but is given to demonstrate particular diagnostic utility for the variants according to the present invention.

[1168] Table 72: Utilities for Variants of HSACMHCP, related to Myosin heavy chain (SEQ ID NO:235), cardiac muscle alpha isoform: MYH6_HUMAN (SEQ ID NO:235)

| | | |
|---|---|---|
| Genetic Marker | ASD—(Atrial septal defect) is one of the most | Nat Genet. 2005 Feb 27 |
| for ASD | common forms of congenital heart malformation. A new | |
| | locus linked with atrial septal defect on chromosome | |
| | 14q12 in a large family with dominantly inherited atrial | |
| | septal defect. The underlying mutation is a missense | |
| | substitution, I820N, in alpha-myosin heavy chain | |
| | (MYH6). | |
| Genetic | Hypertrophic Cardiomyopathy is an excessive | Circulation. 2002; |
| Marker for | thickening of the heart muscle accompanied with | 105: 446 |
| Hypertrophic | abnormal microscopic features. | |
| Cardiomyopathy | G→A transition (exon 20, nucleotide 2384) was | |
| | identified in the α-cardiac myosin heavy chain gene that | |
| | is substitutes glutamine for arginine at residue 795 | |
| | (Arg795Gln). | |
| | Substitution of a hydrophilic glutamine residue | |
| | for the appropriate basic arginine residue could disrupt | |
| | this αhelical domain and potentially disturb to the | |
| | interaction between the myosin heavy chain and the light | |
| | chain interactions. | |
| Predictive | Finding of no αMyHC protein in a setting of LV | Circulation Research. |
| Factor for the Risk of | dysfunction suggests that changes in cardiac MyHC | 2000; 86: 386 |
| Heart Failure (LV | expression can precede the development of overt | |
| dysfunction) | myocardial failure. | |
| Predictive Factor for | Myosin heavy chain (SEQ ID NO: 235) alpha gene | Mol Med. 2002 |
| disease progression in | expression can be selectively associated with alterations | Nov; 8(11): 750-60. |
| human DCM. | in dilated cardiomyopathy (DCM) phenotype. | |
| | Improvement in DCM phenotype was directly related to | |
| | a coordinate increase in alpha- and a decrease in beta- | |
| | myosin heavy chain mRNA expression. | |

[1169] According to other optional embodiments of the present invention, variants of this cluster according to the present invention (amino acid and/or nucleic acid sequences of HSACMHCP may optionally have one or more of the following utilities, some of which are related to utilities described above. It should be noted that these utilities are optionally and preferably suitable for human and non-human animals as subjects, except where otherwise noted.

[1170] A non-limiting example of such a utility is the detection, diagnosis and/or determination of myocardial failure. The method comprises detecting a HSACMHCP variant, for example a variant protein, protein fragment, peptide, polynucleotide, polynucleotide fragment and/or oligonucleotide as described herein, in a sample of a myocardial tissue from a ventricle of the heart, and optionally and preferably in a serum sample. The method further comprises quantitating the expression of alpha-myosin heavy chain (alpha-MHC) in the sample; and determining by statistical analysis if the expression in the sample is significantly different than the expression in normal subject.

[1171] Use of known protein alpha-MHC for diagnosing myocardial failure in human is described with regard to PCT Application No. WO9833942, hereby incorporated by reference as if fully set forth herein. The PCT application describes a method of diagnosing myocardial failure in a human comprising: obtaining a sample of myocardial tissue from a ventricle of the heart of the human; quantitating the expression of a-myosin heavy chain (a-MHC), b-myosin heavy chain (P-MHC), or both in the sample; and determining by statistical analysis if the expression of alpha-MHC, P-MHC, or both in the sample is significantly different than their expression in normal human ventricular myocardial tissue.

[1172] Another example of use of known alpha-MHC for the detection of heart disease, such as myocardial infraction and myocardial disease, is described with regard to EP Application No. EP0131834, and U.S. Pat. No. 4,943,427 hereby incorporated by reference as if fully set forth herein. These applications describe a method of diagnosis of atrial myocardial infarction, which possibly is combined with ventricular myocardial infarction preferably using detection of secretion of myosin heavy chain into the blood during myocardial infarction by performing an immunoassay with the monoclonal antibody specific for a-MHC. U.S. Pat. No. 4,943,427 describes a method for diagnosis of heart disease comprising a radiolabeled monoclonal antibody having specificity to cardiac myosin heavy chain or its active fragment, useful for example for topographic diagnosis of heart disease such as myocardial infarction and myocardial disease, preferably by imaging.

[1173] Another non-limiting example of possible a utility is the detection, diagnosis and/or determination of Hypertrophic Cardiomyopathy. The method comprises detecting a HSACMHCP variant, for example a variant protein, protein fragment, peptide, polynucleotide, polynucleotide fragment and/or oligonucleotide as described herein, for detection, diagnosis and/or determination of Hypertrophic cardiomyopathy. Use of known protein alpha-MHC for detecting the presence or absence of a mutation associated with hypertrophic cardiomyopathy (HC), including diagnosing familial HC (FHC) in a subject is described with regard to PCT Application No. WO9533856, hereby incorporated by reference as if fully set forth herein. The methods include providing DNA which encodes a sarcomeric thin filament protein (e.g., alpha-tropomyosin or cardiac troponin T) and detecting the presence or absence of a mutation in the amplified product which is associated with HC.

[1174] Another non-limiting example of possoble utility of HSACMHCP variant, for example a variant protein, protein fragment, peptide, polynucleotide, polynucleotide fragment and/or oligonucleotide as described herein, is for monitoring cell differentiation, useful for example in drug discovery or pharmacokinetic or pharmacological profiling. An example of method of use of known a-MHC for monitoring cell differentiation by the differentiation-dependent expression of a secreted reporter proteins, subject is described with regard to PCT Application No. WO05005662, hereby incorporated by reference as if fully set forth herein. The PCT describes a method of monitoring cell differentiation comprising: (a) culturing cells capable of differentiating into at least one particular cell type containing at least one recombinant nucleic acid molecule comprising a reporter gene encoding a product that is secreted upon cell differentiation, or maintaining a non-human animal comprising such cells, under conditions allowing differentiation of the cells; and (b) determining the amount or activity of the reporter gene product either within a body fluid of said transgenic non-human animal or the cell culture medium.

[1175] Another non-limiting example of possible a utility is the detection, diagnosis and/or determination of organ failure, more preferably heart failure. The method comprises detecting a HSACMHCP variant, for example a variant protein, protein fragment, peptide, polynucleotide, polynucleotide fragment and/or oligonucleotide as described herein, for detection, diagnosis and/or determination of organ failure, more preferably heart failure. Use of known protein alpha-MHC for predicting cardiac mortality rate, by contacting patient sample with antibody that binds to marker of cell injury, and to a second antibody that binds to a marker of organ adaptation, and determining the binding, is described with regard to PCT Application No. WO03020123, hereby incorporated by reference as if fully set forth herein.

[1176] Another non-limiting example of possible a utility is the detection, diagnosis and/or determination of systemic vasculature events. The method comprises detecting a HSACMHCP variant, for example a variant protein, protein fragment, peptide, polynucleotide, polynucleotide fragment and/or oligonucleotide as described herein, for detection, diagnosis and/or determination of systemic vasculature events, including but not limited to cardiovascular disease, stroke, pulmonary, renovascular, cerebrovascular, thrombotic or generalized arterial or venous condition or event including acute coronary syndrome such as but not limited to acute myocardial infarction, heart failure, atheromoma or a thrombotic condition. The identification of these parameters or more particularly a pattern of parameters enables the diagnosis of a condition or event or the determination of the risk of development of a condition or event associated to the systemic vasculature. It is also useful in determining the risk of a vascular disease including cardiovascular, stroke, pulmonary, renovascular, cerebrovascular, thrombotic or generalized arterial or venous conditions or events in a healthy subject or a subject entering into an exposure to risk such as surgery or chemotherapy. The present invention is useful inter alia for the identification and/or quantitation of biochemical markers of conditions or events in the systemic vasculature such as heart disease, heart disorders, infections of the heart, stroke and thrombosis as well as the determination of a risk of development of these conditions including the absence of disorders or absence of risk of the development of a disorder. An example of method of use of known a-MHC for diagnosis of systemic vasculature events is described with regard to PCT Application No. WO0223191, hereby incorporated by reference as if fully set forth herein. The PCT describes a diagnostic assay for systemic vasculature events comprises assaying an array of markers and correlating the results.

[1177] Another non-limiting example of a possible utility is the detection, diagnosis and/or determination of dissecting aortic aneurysm. The method comprises detecting a HSACMHCP variant, for example a variant protein, protein fragment, peptide, polynucleotide, polynucleotide fragment and/or oligonucleotide as described herein, for detection, diagnosis and/or determination of dissecting aortic aneurysm. An example of method of use of known alpha-MHC for diagnosis of dissecting aortic aneurysm is described with regard to EP Application No. EP0782863, hereby incorporated by reference as if fully set forth herein. The EP application describes diagnosing of dissecting aortic aneurysm by assaying the heavy chain of a smooth muscle myosin present in the blood of a patient by using an antibody against the heavy chain.

[1178] Another non-limiting example of possible a utility is the detection, diagnosis and/or determination of graft rejection. The method comprises detecting a HSACMHCP variant, for example a variant protein, protein fragment, peptide, polynucleotide, polynucleotide fragment and/or oligonucleotide as described herein, for detection, diagnosis and/or determination of graft rejection, more preferably cardiac transplant rejection. Allograft rejection is initiated by an immune response to donor major histocompatibility complex proteins. After allogeneic heart transplantation, de novo CD4+ T cell and B cell autoimmune responses to contractile proteins of cardiac muscle, e.g. cardiac myosin (CM), are elicited. The transplantation induced autoimmune response to cardiac myosin plays a significant role in cardiac transplant rejection. An example of a method of use of known a-MHC for diagnosis of graft rejection against a heart transplanted into a mammalian recipient, is described with regard to U.S. Pat. No. 6,358,751, hereby incorporated by reference as if fully set forth herein. The US patent describes a method comprising: detecting the presence of immune reactivity to autologous contractile proteins expressed in cardiac tissue and native to said mammalian recipient wherein said autologous contractile protein is a-myosin heavy chain; wherein the presence of said immune reactivity is indicative of rejection of said transplanted heart.

[1179] Cluster HSACMHCP belongs to a family of proteins which are known to have functions related to noninvasive infarct sizing, hypertrophic cardiomyopathy and muscle plasticity in response to various mechanical perturbations, including but not limited to, MYH13, MYH4, MYH7, MYH8, MYH3, MYH11, MYH14. These functions are described below; one or more variants of cluster HSACMHCP may optionally have one or more diagnostic utilities related to these functions.

[1180] Myosin light chains which may have value in noninvasive infarct sizing (Foreback C C.: Biochemical diagnosis of myocardial infarction. Henry Ford Hosp Med J. 1991; 39(3-4):159-64.); Acute myeloid leukaemia (AML) associated with the inversion chromosome 16 involving MYH11 (Kuss B J et al.: The biological significance of the multidrug resistance gene MRP in inversion 16 leukemias. Leuk Lymphoma. 1996 February; 20(5-6):357-64.); The first known cause of HCM (hypertrophic cardiomyopathy) was a point mutation in the cardiac beta-myosin heavy chain gene on chromosome 14 (Vosberg H P.: Identification of gene defects by linkage analysis: use in inherited cardiomyopathies. Eur Heart J. 1994 December; 15 Suppl D:20-3.); as the regulation of the myosin gene family is under the control of a complex set of processes including, but not limited to, activity, hormonal, and metabolic factors, this protein will serve as a cellular “marker” for studies of muscle plasticity in response to various mechanical perturbations in which the quantity and type of myosin isoform, along with other important cellular proteins, are altered in expression. (Baldwin K M, Haddad F.: Skeletal muscle plasticity: cellular and molecular responses to altered physical activity paradigms. Am J Phys Med Rehabil. 2002 November; 81 (11 Suppl):S40-51.). Smooth muscle myosin heavy chain (MYH11) is a specific marker of smooth muscle cells (Couffinhal T, et al.: Kinetics of adventitial repair in the rat carotid model. Coron Artery Dis. 2001 December; 12(8):635-48.); Studies using an assay developed against smooth muscle myosin heavy chain, a protein which is released from the aortic medial smooth muscle cells on insult to the aortic wall, showed promising results for use of this assay in the diagnosis of aortic dissection. (Suzuki T, Katoh H, Nagai R.: Biochemical diagnosis of aortic dissection: from bench to bedside. Jpn Heart J. 1999 September; 40(5):527-34.). Age-related sarcopenia is associated with Myosin Heavy chain proteins (Short K R, Nair K S.: Mechanisms of sarcopenia of aging. J Endocrinol Invest. 1999; 22(5 Suppl):95-105.). Hypertrophic cardiomyopathy is indicated by mutations in Myosin heavy chain (SEQ ID NO:235) beta (Seiler C.: Hypertrophic cardiomyopathy: spontaneous course Schweiz Med Wochenschr. 1995 Oct. 14; 125(41):1931-9.). Recent identification of mutations in the beta myosin heavy chain gene and genotype-phenotype correlation in HCM patients have shown that the beta myosin heavy chain mutations are also prognosticators in HCM families. (Marian A J.: Sudden cardiac death in patients with hypertrophic cardiomyopathy: from bench to bedside with an emphasis on genetic markers. Clin Cardiol. 1995 April; 18(4): 189-98.). All of these functions may optionally be diagnostic utilities of one or more HSACMHCP variants according to the present invention.

[1181] Table 73 below describes diagnostic utilities for the cluster HSACMHCP that were found through microarrays, including the statistical significance thereof and a reference. One or more HSACMHCP variants according to the present invention may optionally have one or more of these utilities.

TABLE 73

| | Statistical | |
|---|---|---|
| Diagnostic utility | significance | reference |
| Gene over expressed | 3.5E−4 | 1. Bhattacharjee A, Meyerson M |
| in lung cancer | | PNAS (2001) Classification of |
| Metastasis | | human lung carcinomas by |
| (vs. primary cancer). | | mRNA expression profiling |
| | | reveals distinct adenocarcinoma |
| | | subclasses |
| Gene over expressed | 6.1E−7 | 1. Nutt CL, Louis DN. Cancer |
| in Non-Classic Glioma | | Res (2003) Gene expression- |
| (vs. Classical). | | based classification of |
| | | malignant gliomas correlates |
| | | better with survival than |
| | | histological classification. |

[1182] Other non-limiting exemplary utilities for HSACMHCP variants according to the present invention are described in greater detail below and also with regard to the previous section on clinical utility.

[1183] The heart-selective diagnostic marker prediction engine provided the following results with regard to cluster HSACMHCP. Predictions were made for selective expression of transcripts of this contig in heart tissue, according to the previously described methods. The numbers on the y-axis of the first figure below refer to weighted expression of ESTs in each category, as “parts per million” (ratio of the expression of ESTs for a particular cluster to the expression of all ESTs in that category, according to parts per million).

[1184] Overall, the following results were obtained as shown with regard to the histogram in FIG. 24, concerning the number of heart-specific clones in libraries/sequences; as well as with regard to the histogram in FIGS. 25-26, concerning the actual expression of oligonucleotides in various tissues, including heart.

[1185] This cluster was found to be selectively expressed in heart for the following reasons: in a comparison of the ratio of expression of the cluster in heart specific ESTs to the overall expression of the cluster in non-heart ESTs, which was found to be 24; the ratio of expression of the cluster in heart specific ESTs to the overall expression of the cluster in muscle-specific ESTs which was found to be 92.5; and fisher exact test P-values were computed both for library and weighted clone counts to check that the counts are statistically significant, and were found to be 3.20E-47.

[1186] One particularly important measure of specificity of expression of a cluster in heart tissue is the previously described comparison of the ratio of expression of the cluster in heart as opposed to muscle. This cluster was found to be specifically expressed in heart as opposed to non-heart ESTs as described above. However, many proteins have been shown to be generally expressed at a higher level in both heart and muscle, which is less desirable. For this cluster, as described above, the ratio of expression of the cluster in heart specific ESTs to the overall expression of the cluster in muscle-specific ESTs which was found to be 24, which clearly supports specific expression in heart tissue.

[1187] As noted above, cluster HSACMHCP features 7 transcript(s), which were listed in Table 68 above. These transcript(s) encode for protein(s) which are variant(s) of protein Myosin heavy chain (SEQ ID NO:235), cardiac muscle alpha isoform. A description of each variant protein according to the present invention is now provided.

[1188] Variant protein HSACMHCP_PEA_{—}1_P2 (SEQ ID NO:239) according to the present invention has an amino acid sequence; it is encoded by transcript(s) HSACMHCP_PEA_{—}1_T2 (SEQ ID NO:167). An alignment is given to the known protein (Myosin heavy chain (SEQ ID NO:235), cardiac muscle alpha isoform) at the end of the application. One or more alignments to one or more previously published protein sequences are given in the alignment table located on the attached CDROM. A brief description of the relationship of the variant protein according to the present invention to each such aligned protein is as follows:

[1189] Comparison report between HSACMHCP_PEA_{—}1_P2 (SEQ ID NO:239) and MYH6_HUMAN_V1 (SEQ ID NO:236):

[1190] 1. An isolated chimeric polypeptide encoding for HSACMHCP_PEA_{—}1_P2 (SEQ ID NO:239), comprising a first amino acid sequence being at least 90% homologous to MTDAQMADFGAAAQYLRKSEKERLEAQTRPFDIRTECFVPDDKEEFVKAKILSREGGKVIAETEN GKTVTVKEDQVLQQNPPKFDKIEDMAMLTFLHEPAVLFNLKERYAAWMIYTYSGLFCVTVNPYK WLPVYNAEVVAAYRGKKRSEAPPHIFSISDNAYQYMLTDRENQSILITGESGAGKTVNTKRVIQYF ASIAAIGDRGKKDNANANKGTLEDQIIQANPALEAFGNAKTVRNDNSSRFGKFIRIHFGATGKLAS ADIETYLLEKSRVIFQLKAERNYHIFYQILSNKKPELLDMLLVTNNPYDYAFVSQGEVSVASIDDSE ELMATDSAFDVLGFTSEEKAGVYKLTGAIMHYGNMKFKQKQREEQAEPDGTEDADKSAYLMGL NSADLLKGLCHPRVKVGNEYVTKGQSVQQVYYSIGALAKAVYEKMFNWMVTRINATLETKQPR QYFIGVLDIAGFEIFDFNSFEQLCINFTNEKLQQFFNHHMFVLEQEEYKKEGIEWTFIDFGMDLQACI DLIEKPMGIMSILEEECMFPKATDMTFKAKLYDNHLGKSNNFQKPRNIKGKQEAHFSLIHYAGTVD YNILGWLEKNKDPLNETVVALYQKSSLKLMATLFSSYATADTGDSGKSKGGKKKGSSFQTVSAL HRENLNKLMTNLRTTHPHFVRCIIPNERKAPGVMDNPLVMHQLRCNGVLEGIRICRKGFPNRILYG DFRQRYRILNPVAIPEGQFIDSRKGTEKLLSSLDIDHNQYKFGHTKVFFKAGLLGLLEEMRDERLSR IITRMQAQARGQLMRIEFKKIVERRDALLVIQWNIRAFMGVKNWPWMKLYFKIKPLLKSAETEKE MATMKEEFGRIKETLEKSEARRKELEEKMVSLLQEKNDLQLQVQAEQDNLNDAEERCDQLIKNKI QLEAKVKEMNERLEDEEEMNAELTAKKRKLEDECSELKKDIDDLELTLAKVEKEKHATENKVKN LTEEMAGLDEIIAKLTKEKKALQEAHQQALDDLQVEEDKVNSLSKSKVKLEQQVDDLEGSLEQEK KVRMDLERAKRKLEGDLKLTQESIMDLENDKLQLEEKLKKKEFDINQQNSKIEDEQALALQLQKK LKENQARIEELEEELEAERTARAKVEKLRSDLSRELEEISERLEEAGGATSVQIEMNKKREAEFQK MRRDLEEATLQHEATAAALRKKHADSVAELGEQIDNLQRVKQKLEKEKSEFKLELDDVTSNMEQ IIKAKANLEKVSRTLEDQANEYRVKLEEAQRSLNDFTTQRAKLQTENGELARQLEEKEALISQLTR GKLSYTQQMEDLKRQLEEEGKAKNALAHALQSARHDCDLLREQYEEETEAKAELQRVLSKANSE VAQWRTKYETDAIQRTEELEEAKKKLAQRLQDAEEAVEAVNAKCSSLEKTKHRLQNEIEDLMVD VERSNAAAAALDKKQRNFDKILAEWKQKYEESQSELESSQKEARSLSTELFKLKNAYEESLEHLET FKRENKNLQEEISDLTEQLGEGGKNVHELEKVRKQLEVEKLELQSALEEAEASLEHEEGKILRAQL EFNQIKAEIERKLAEKDEEMEQAKRNHQRVVDSLQTSLDAETRSRNEVLRVKKKMEGDLNEMEIQ LSHANRMAAEAQKQVKSLQSLLKDTQIQLDDAVRANDDLKENIAIVERRNNLLQAELEELRAVVE QTERSRKLAEQELIETSERVQLLHSQNTSLINQKKKMESDLTQLQSEVEEAVQECRNAEEKAKKAI TDAAMMAEELKKEQDTSAHLERMKKNMEQTIKDLQHRLDEAEQIALKGGKKQLQKLEARVREL EGELEAEQKRNAESVKGMRKSERRIKELTYQ corresponding to amino acids 1-1855 of MYH6_HUMAN_V1 (SEQ ID NO:236), which also corresponds to amino acids 1-1855 of HSACMHCP_PEA_{—}1_P2 (SEQ ID NO:239), and a second amino acid sequence being at least 70%, optionally at least 80%, preferably at least 85%, more preferably at least 90% and most preferably at least 95% homologous to a polypeptide having the sequence VRRTPDTGSRCGSFFSGPTAPPSQGSSHLLLEMLLVDLTFFSRSAVSLT (SEQ ID NO: 644) corresponding to amino acids 1856-1904 of HSACMHCP_PEA_{—}1_P2 (SEQ ID NO:239), wherein said first amino acid sequence and second amino acid sequence are contiguous and in a sequential order.

[1191] 2. An isolated polypeptide encoding for a tail of HSACMHCP_PEA_{—}1_P2 (SEQ ID NO:239), comprising a polypeptide being at least 70%, optionally at least about 80%, preferably at least about 85%, more preferably at least about 90% and most preferably at least about 95% homologous to the sequence VRRTPDTGSRCGSFFSGPTAPPSQGSSHLLLEMLLVDLTFFSRSAVSLT (SEQ ID NO: 644) in HSACMHCP_PEA_{—}1_P2 (SEQ ID NO:239).

[1192] It should be noted that the known protein sequence (MYH6_HUMAN (SEQ ID NO:235)) has one or more changes than the sequence named as being the amino acid sequence for MYH6_HUMAN_V1 (SEQ ID NO:236). These changes were previously known to occur and are listed in table 74 below.

TABLE 74
Changes to MYH6_HUMAN_V1 (SEQ ID NO: 236)

| SNP position(s) on amino | |
|---|---|
| acid sequence | Type of change |
| 89 | conflict |
| 1735 | conflict |

[1193] The location of the variant protein was determined according to results from a number of different software programs and analyses, including analyses from SignalP and other specialized programs. The variant protein is believed to be located as follows with regard to the cell: intracellularly.

[1194] The phosphorylation sites of variant protein HSACMHCP_PEA_{—}1_P2 (SEQ ID NO:239), as compared to the known protein Myosin heavy chain (SEQ ID NO:235), cardiac muscle alpha isoform, are described in Table 75 (given according to their position(s) on the amino acid sequence in the first column; the second column indicates whether the phosphorylation site is present in the variant protein; and the last column indicates whether the position is different on the variant protein).

TABLE 75
Phosphorylation site(s)

| Position(s) on known | Present in | Position in |
|---|---|---|
| amino acid sequence | variant protein? | variant protein? |
| 129 | Yes | 129 |

[1195] The variant protein has the following domains, as determined by using InterPro. The domains are described in Table 76:

TABLE 76
InterPro domain(s)

| InterPro ID | Domain description | Analysis type | Position(s) on protein |
|---|---|---|---|
| IPR001609 | Myosin head (motor domain) | FPrintScan | 115-134, 171-196, 226-253, |
| | | | 457-485, 511-539 |
| IPR001609 | Myosin head (motor domain) | HMMPfam | 87-768 |
| IPR002928 | Myosin tail | HMMPfam | 1070-1856 |
| IPR004009 | Myosin N-terminal SH3-like | HMMPfam | 34-77 |
| | domain | | |
| IPR001609 | Myosin head (motor domain) | HMMSmart | 79-781 |
| IPR001609 | Myosin head (motor domain) | BlastProDom | 168-253 |
| IPR000048 | IQ calmodulin-binding region | ProfileScan | 783-812 |

[1196] Variant protein HSACMHCP_PEA_{—}1_P2 (SEQ ID NO:239) is encoded by the following transcript(s): HSACMHCP_PEA_{—}1_T2 (SEQ ID NO:167). The coding portion of transcript HSACMHCP_PEA_{—}1_T2 (SEQ ID NO:167) starts at position 78 and ends at position 5789.

[1197] Variant protein HSACMHCP_PEA_{—}1_P3 (SEQ ID NO:240) according to the present invention has an amino acid sequence; it is encoded by transcript(s) HSACMHCP_PEA_{—}1_T3 (SEQ ID NO:168). An alignment is given to the known protein (Myosin heavy chain (SEQ ID NO:235), cardiac muscle alpha isoform) at the end of the application. One or more alignments to one or more previously published protein sequences are given in the alignment table located on the attached CDROM. A brief description of the relationship of the variant protein according to the present invention to each such aligned protein is as follows:

[1198] Comparison report between HSACMHCP_PEA_{—}1_P3 (SEQ ID NO:240) and MYH6_HUMAN_V2 (SEQ ID NO:237):

[1199] 1. An isolated chimeric polypeptide encoding for HSACMHCP_PEA_{—}1_P3 (SEQ ID NO:240), comprising a first amino acid sequence being at least 90% homologous to MTDAQMADFGAAAQYLRKSEKERLEAQTRPFDIRTECFVPDDKEEFVKAKILSREGGKVIAETEN GKTVTVKEDQVLQQNPPKFDKIEDMAMLTFLHEPAVLFNLKERYAAWMIYTYSGLFCVTVNPYK WLPVYNAEVVAAYRGKKRSEAPPHIFSISDNAYQYMLTDRENQSILITGESGAGKTVNTKRVIQYF ASIAAIGDRGKKDNANANKGTLEDQIIQANPALEAFGNAKTVRNDNSSRFGKFIRIHFGATGKLAS ADIETYLLEKSRVIFQLKAERNYHIFYQILSNKKPELLDMLLVTNNPYDYAFVSQGEVSVASIDDSE ELMATDSAFDVLGFTSEEKAGVYKLTGAIMHYGNMKFKQKQREEQAEPDGTEDADKSAYLMGL NSADLLKGLCHPRVKVGNEYVTKGQSVQQVYYSIGALAKAVYEKMFNWMVTRINATLETKQPR QYFIGVLDIAGFEIFDFNSFEQLCINFTNEKLQQFFNHHMFVLEQEEYKKEGIEWTFIDFGMDLQACI DLIEKPMGIMSILEEECMFPKATDMTFKAKLYDNHLGKSNNFQKPRNIKGKQEAHFSLIHYAGTVD YNILGWLEKNKDPLNETVVALYQKSSLKLMATLFSSYATADTGDSGKSKGGKKKGSSFQTVSAL HRENLNKLMTNLRTTHPHFVRCIIPNERKAPGVMDNPLVMHQLRCNGVLEGIRICRKGFPNRILYG DFRQRYRILNPVAIPEGQFIDSRKGTEKLLSSLDIDHNQYKFGHTKVFFKAGLLGLLEEMRDERLSR IITRMQAQARGQLMRIEFKKIVERRDALLVIQWNIRAFMGVKNWPWMKLYFKIKPLLKSAETEKE MATMKEEFGRIKETLEKSEARRKELEEKMVSLLQEKNDLQLQVQAEQDNLNDAEERCDQLIKNKI QLEAKVKEMNERLEDEEEMNAELTAKKRKLEDECSELKKDIDDLELTLAKVEKEKHATENKVKN LTEEMAGLDEIIAKLTKEKKALQEAHQQALDDLQVEEDKVNSLSKSKVKLEQQVDDLEGSLEQEK KVRMDLERAKRKLEGDLKLTQESIMDLENDKLQLEEKLKKKEFDINQQNSKIEDEQALALQLQKK LKENQARIEELEEELEAERTARAKVEKLRSDLSRELEEISERLEEAGGATSVQIEMNKKREAEFQK MRRDLEEATLQHEATAAALRKKHADSVAELGEQIDNLQRVKQKLEKEKSEFKLELDDVTSNMEQ IIKAKANLEKVSRTLEDQANEYRVKLEEAQRSLNDFTTQRAKLQTENGELARQLEEKEALISQLTR GKLSYTQQMEDLKRQLEEEGK corresponding to amino acids 1-1326 of MYH6_HUMAN_V2 (SEQ ID NO:237), which also corresponds to amino acids 1-1326 of HSACMHCP_PEA_{—}1_P3 (SEQ ID NO:240), and a second amino acid sequence being at least 70%, optionally at least 80%, preferably at least 85%, more preferably at least 90% and most preferably at least 95% homologous to a polypeptide having the sequence VRPSGEGGQA (SEQ ID NO: 645) corresponding to amino acids 1327-1336 of HSACMHCP_PEA_{—}1_P3 (SEQ ID NO:240), wherein said first amino acid sequence and second amino acid sequence are contiguous and in a sequential order.

[1200] 2. An isolated polypeptide encoding for a tail of HSACMHCP_PEA_{—}1_P3 (SEQ ID NO:240), comprising a polypeptide being at least 70%, optionally at least about 80%, preferably at least about 85%, more preferably at least about 90% and most preferably at least about 95% homologous to the sequence VRPSGEGGQA (SEQ ID NO: 645) in HSACMHCP_PEA_{—}1_P3 (SEQ ID NO:240).

[1201] It should be noted that the known protein sequence (MYH6_HUMAN (SEQ ID NO:235)) has one or more changes than the sequence named as being the amino acid sequence for MYH6_HUMAN_V2 (SEQ ID NO:237). These changes were previously known to occur and are listed in table 77 below.

TABLE 77
Changes to MYH6_HUMAN_V2 (SEQ ID NO: 237)

| SNP position(s) on amino | |
|---|---|
| acid sequence | Type of change |
| 89 | conflict |

[1202] The location of the variant protein was determined according to results from a number of different software programs and analyses, including analyses from SignalP and other specialized programs. The variant protein is believed to be located as follows with regard to the cell: intracellularly.

[1203] The phosphorylation sites of variant protein HSACMHCP_PEA_{—}1_P3 (SEQ ID NO:240), as compared to the known protein Myosin heavy chain (SEQ ID NO:235), cardiac muscle alpha isoform, are described in Table 78 (given according to their position(s) on the amino acid sequence in the first column; the second column indicates whether the phosphorylation site is present in the variant protein; and the last column indicates whether the position is different on the variant protein).

TABLE 78
Phosphorylation site(s)

| Position(s) on known | Present in | Position in |
|---|---|---|
| amino acid sequence | variant protein? | variant protein? |
| 129 | Yes | 129 |

[1204] The variant protein has the following domains, as determined by using InterPro. The domains are described in Table 79:

TABLE 79
InterPro domain(s)

| InterPro ID | Domain description | Analysis type | Position(s) on protein |
|---|---|---|---|
| IPR001609 | Myosin head (motor domain) | FPrintScan | 115-134, 171-196, 226-253, |
| | | | 457-485, 511-539 |
| IPR001609 | Myosin head (motor domain) | HMMPfam | 87-768 |
| IPR002928 | Myosin tail | HMMPfam | 1070-1328 |
| IPR004009 | Myosin N-terminal SH3-like | HMMPfam | 34-77 |
| | domain | | |
| IPR001609 | Myosin head (motor domain) | HMMSmart | 79-781 |
| IPR001609 | Myosin head (motor domain) | BlastProDom | 168-253 |
| IPR000048 | IQ calmodulin-binding region | ProfileScan | 783-812 |

[1205] Variant protein HSACMHCP_PEA_{—}1_P3 (SEQ ID NO:240) is encoded by the following transcript(s): HSACMHCP_PEA_{—}1_T3 (SEQ ID NO:168). The coding portion of transcript HSACMHCP_PEA_{—}1_T3 (SEQ ID NO:168) starts at position 78 and ends at position 4085.

[1206] Variant protein HSACMHCP_PEA_{—}1_P4 (SEQ ID NO:241) according to the present invention has an amino acid sequence; it is encoded by transcript(s) HSACMHCP_PEA_{—}1_T4 (SEQ ID NO:169). An alignment is given to the known protein (Myosin heavy chain (SEQ ID NO:235), cardiac muscle alpha isoform) at the end of the application. One or more alignments to one or more previously published protein sequences are given in the alignment table located on the attached CDROM. A brief description of the relationship of the variant protein according to the present invention to each such aligned protein is as follows:

[1207] Comparison report between HSACMHCP_PEA_{—}1_P4 (SEQ ID NO:241) and MYH6_HUMAN_V2 (SEQ ID NO:237):

[1208] 1. An isolated chimeric polypeptide encoding for HSACMHCP_PEA_{—}1_P4 (SEQ ID NO:241), comprising a first amino acid sequence being at least 90% homologous to MTDAQMADFGAAAQYLRKSEKERLEAQTRPFDIRTECFVPDDKEEFVKAKILSREGGKVIAETEN GKTVTVKEDQVLQQNPPKFDKIEDMAMLTFLHEPAVLFNLKERYAAWMIYTYSGLFCVTVNPYK WLPVYNAEVVAAYRGKKRSEAPPHIFSISDNAYQYMLTDRENQSILITGESGAGKTVNTKRVIQYF ASIAAIGDRGKKDNANANKGTLEDQIIQANPALEAFGNAKTVRNDNSSRFGKFIRIHFGATGKLAS ADIETYLLEKSRVIFQLKAERNYHIFYQILSNKKPELLDMLLVTNNPYDYAFVSQGEVSVASIDDSE ELMATDSAFDVLGFTSEEKAGVYKLTGAIMHYGNMKFKQKQREEQAEPDGTEDADKSAYLMGL NSADLLKGLCHPRVKVGNEYVTKGQSVQQVYYSIGALAKAVYEKMFNWMVTRINATLETKQPR QYFIGVLDIAGFEIFDFNSFEQLCINFTNEKLQQFFNHHMFVLEQEEYKKEGIEWTFIDFGMDLQACI DLIEKPMGIMSILEEECMFPKATDMTFKAKLYDNHLGKSNNFQKPRNIKGKQEAHFSLIHYAGTVD YNILGWLEKNKDPLNETVVALYQKSSLKLMATLFSSYATADTGDSGKSKGGKKKGSSFQTVSAL HRENLNKLMTNLRTTHPHFVRCIIPNERKAPGVMDNPLVMHQLRCNGVLEGIRICRKGFPNRILYG DFRQRYRILNPVAIPEGQFIDSRKGTEKLLSSLDIDHNQYKFGHTKVFFKAGLLGLLEEMRDERLSR IITRMQAQARGQLMRIEFKKIVERRDALLVIQWNIRAFMGVKNWPWMKLYFKIKPLLKSAETEKE MATMKEEFGRIKETLEKSEARRKELEEKMVSLLQEKNDLQLQVQAEQDNLNDAEERCDQLIKNKI QLEAKVKEMNERLEDEEEMNAELTAKKRKLEDECSELKKDIDDLELTLAKVEKEKHATENKVKN LTEEMAGLDEIIAKLTKEKKALQEAHQQALDDLQVEEDKVNSLSKSKVKLEQQVDDLEGSLEQEK KVRMDLERAKRKLEGDLKLTQESIMDLENDKLQLEEKLKKKEFDINQQNSKIEDEQALALQLQKK LKENQARIEELEEELEAERTARAKVEKLRSDLSRELEEISERLEEAGGATSVQIEMNKKREAEFQK MRRDLEEATLQHEATAAALRKKHADSVAELGEQIDNLQRVKQKLEKEKSEFKLELDDVTSNMEQ IIKAKANLEKVSRTLEDQANEYRVKLEEAQRSLNDFTTQRAKLQTENGELARQLEEKEALISQLTR GKLSYTQQMEDLKRQLEEEGKAKNALAHALQSARHDCDLLREQYEEETEAKAELQRVLSKANSE VAQWRTKYETDAIQRTEELEEAKKKLAQRLQDAEEAVEAVNAKCSSLEKTKHRLQNEIEDLMVD VERSNAAAAALDKKQRNFDKILAEWKQKYEESQSELESSQKEARSLSTELFKLKNAYEESLEHLET FKRENKNLQ corresponding to amino acids 1-1508 of MYH6_HUMAN-V2 (SEQ ID NO:237), which also corresponds to amino acids 1-1508 of HSACMHCP_PEA_{—}1_P4 (SEQ ID NO:241), and a second amino acid sequence being at least 70%, optionally at least 80%, preferably at least 85%, more preferably at least 90% and most preferably at least 95% homologous to a polypeptide having the sequence GVLGVQEARDELVGGRAMQGQGEHRL (SEQ ID NO: 646) corresponding to amino acids 1509-1534 of HSACMHCP_PEA_{—}1_P4 (SEQ ID NO:241), wherein said first amino acid sequence and second amino acid sequence are contiguous and in a sequential order.

[1209] 2. An isolated polypeptide encoding for a tail of HSACMHCP_PEA_{—}1_P4 (SEQ ID NO:241), comprising a polypeptide being at least 70%, optionally at least about 80%, preferably at least about 85%, more preferably at least about 90% and most preferably at least about 95% homologous to the sequence GVLGVQEARDELVGGRAMQGQGEHRL (SEQ ID NO: 646) in HSACMHCP_PEA_{—}1_P4 (SEQ ID NO:241).

[1210] It should be noted that the known protein sequence (MYH6_HUMAN (SEQ ID NO:235)) has one or more changes than the sequence named as being the amino acid sequence for MYH6_HUMAN_V2 (SEQ ID NO:237). These changes were previously known to occur and are listed in table 80 below.

TABLE 80
Changes to MYH6_HUMAN_V2 (SEQ ID NO: 237)

| SNP position(s) on amino | |
|---|---|
| acid sequence | Type of change |
| 89 | Conflict |

[1211] The location of the variant protein was determined according to results from a number of different software programs and analyses, including analyses from SignalP and other specialized programs. The variant protein is believed to be located as follows with regard to the cell: intracellularly.

[1212] The phosphorylation sites of variant protein HSACMHCP_PEA_{—}1_P4 (SEQ ID NO:241), as compared to the known protein Myosin heavy chain (SEQ ID NO:235), cardiac muscle alpha isoform, are described in Table 81 (given according to their position(s) on the amino acid sequence in the first column; the second column indicates whether the phosphorylation site is present in the variant protein; and the last column indicates whether the position is different on the variant protein).

TABLE 81
Phosphorylation site(s)

| Position(s) on known | Present in | Position in |
|---|---|---|
| amino acid sequence | variant protein? | variant protein? |
| 129 | yes | 129 |

[1213] The variant protein has the following domains, as determined by using InterPro. The domains are described in Table 82:

TABLE 82
InterPro domain(s)

| | Domain | | Position(s) |
|---|---|---|---|
| InterPro ID | description | Analysis type | on protein |
| IPR001609 | Myosin head | FPrintScan | 115-134, 171-196, |
| | (motor domain) | | 226-253, 457-485, |
| | | | 511-539 |
| IPR001609 | Myosin head | HMMPfam | 87-768 |
| | (motor domain) | | |
| IPR002928 | Myosin tail | HMMPfam | 1070-1508 |
| IPR004009 | Myosin N-terminal | HMMPfam | 34-77 |
| | SH3-like domain | | |
| IPR001609 | Myosin head | HMMSmart | 79-781 |
| | (motor domain) | | |
| IPR001609 | Myosin head | BlastProDom | 168-253 |
| | (motor domain) | | |
| IPR000048 | IQ calmodulin- | ProfileScan | 783-812 |
| | binding region | | |

[1214] Variant protein HSACMHCP_PEA_{—}1_P4 (SEQ ID NO:241) is encoded by the following transcript(s): HSACMHCP_PEA_{—}1_T4 (SEQ ID NO:169). The coding portion of transcript HSACMHCP_PEA_{—}1_T4 (SEQ ID NO:169) starts at position 78 and ends at position 4679.

[1215] Variant protein HSACMHCP_PEA_{—}1_P6 (SEQ ID NO:242) according to the present invention has an amino acid sequence; it is encoded by transcript(s) HSACMHCP_PEA_{—}1_T7 (SEQ ID NO:171). An alignment is given to the known protein (Myosin heavy chain (SEQ ID NO:235), cardiac muscle alpha isoform) at the end of the application. One or more alignments to one or more previously published protein sequences are given in the alignment table located on the attached CDROM. A brief description of the relationship of the variant protein according to the present invention to each such aligned protein is as follows:

[1216] Comparison report between HSACMHCP_PEA_{—}1_P6 (SEQ ID NO:242) and MYH6_HUMAN_V1 (SEQ ID NO:236):

[1217] 1. An isolated chimeric polypeptide encoding for HSACMHCP_PEA_{—}1_P6 (SEQ ID NO:242), comprising a first amino acid sequence being at least 90% homologous to MTDAQMADFGAAAQYLRKSEKERLEAQTRPFDIRTECFVPDDKEEFVKAKILSREGGKVIAETEN GKTVTVKEDQVLQQNPPKFDKIEDMAMLTFLHEPAVLFNLKERYAAWMIYTYSGLFCVTVNPYK WLPVYNAEVVAAYRGKKRSEAPPHIFSISDNAYQYMLTDRENQSILITGESGAGKTVNTKRVIQYF ASIAAIGDRGKKDNANANKGTLEDQIIQANPALEAFGNAKTVRNDNSSRFGKFIRIHFGATGKLAS ADIETYLLEKSRVIFQLKAERNYHIFYQILSNKKPELLDMLLVTNNPYDYAFVSQGEVSVASIDDSE ELMATDSAFDVLGFTSEEKAGVYKLTGAIMHYGNMKFKQKQREEQAEPDGTEDADKSAYLMGL NSADLLKGLCHPRVKVGNEYVTKGQSVQQVYYSIGALAKAVYEKMFNWMVTRINATLETKQPR QYFIGVLDIAGFEIFDFNSFEQLCINFTNEKLQQFFNHHMFVLEQEEYKKEGIEWTFIDFGMDLQACI DLIEKPMGIMSILEEECMFPKATDMTFKAKLYDNHLGKSNNFQKPRNIKGKQEAHFSLIHYAGTVD YNILGWLEKNKDPLNETVVALYQKSSLKLMATLFSSYATADTGDSGKSKGGKKKGSSFQTVSAL HRENLNKLMTNLRTTHPHFVRCIIPNERKAPGVMDNPLVMHQLRCNGVLEGIRICRKGFPNRILYG DFRQRYRILNPVAIPEGQFIDSRKGTEKLLSSLDIDHNQYKFGHTKVFFKAGLLGLLEEMRDERLSR IITRMQAQARGQLMRIEFKKIVERRDALLVIQWNIRAFMGVKNWPWMKLYFKIKPLLKSAETEKE MATMKEEFGRIKETLEKSEARRKELEEKMVSLLQEKNDLQLQVQAEQDNLNDAEERCDQLIKNKI QLEAKVKEMNERLEDEEEMNAELTAKKRKLEDECSELKKDIDDLELTLAKVEKEKHATENKVKN LTEEMAGLDEIIAKLTKEKKALQEAHQQALDDLQVEEDKVNSLSKSKVKLEQQVDDLEGSLEQEK KVRMDLERAKRKLEGDLKLTQESIMDLENDKLQLEEKLKKKEFDINQQNSKIEDEQALALQLQKK LKENQARIEELEEELEAERTARAKVEKLRSDLSRELEEISERLEEAGGATSVQIEMNKKREAEFQK MRRDLEEATLQHEATAAALRKKHADSVAELGEQIDNLQRVKQKLEKEKSEFKLELDDVTSNMEQ IIKAKANLEKVSRTLEDQANEYRVKLEEAQRSLNDFTTQRAKLQTENGELARQLEEKEALISQLTR GKLSYTQQMEDLKRQLEEEGKAKNALAHALQSARHDCDLLREQYEEETEAKAELQRVLSKANSE VAQWRTKYETDAIQRTEELEEAKKKLAQRLQDAEEAVEAVNAKCSSLEKTKHRLQNEIEDLMVD VERSNAAAAALDKKQRNFDKILAEWKQKYEESQSELESSQKEARSLSTELFKLKNAYEESLEHLET FKRENKNLQEEISDLTEQLGEGGKNVHELEKVRKQLEVEKLELQSALEEAEASLEHEEGKILRAQL EFNQIKAEIERKLAEKDEEMEQAKRNHQRVVDSLQTSLDAETRSRNEVLRVKKKMEGDLNEMEIQ LSHANRMAAEAQKQVKSLQSLLKDTQIQLDDAVRANDDLKENIAIVERRNNLLQAELEELRAVVE QTERSRKLAEQELIETSERVQLLHSQNTSLINQKKKMESDLTQLQSEVEEAVQECRNAEEKAKKAI TD corresponding to amino acids 1-1763 of MYH6_HUMAN_V1 (SEQ ID NO:236), which also corresponds to amino acids 1-1763 of HSACMHCP_PEA_{—}1_P6 (SEQ ID NO:242), and a second amino acid sequence being at least 70%, optionally at least 80%, preferably at least 85%, more preferably at least 90% and most preferably at least 95% homologous to a polypeptide having the sequence VSDRPPSASPKDRNKALGPGQATVL (SEQ ID NO: 647) corresponding to amino acids 1764-1788 of HSACMHCP_PEA_{—}1_P6 (SEQ ID NO:242), wherein said first amino acid sequence and second amino acid sequence are contiguous and in a sequential order.

[1218] 2. An isolated polypeptide encoding for a tail of HSACMHCP_PEA_{—}1_P6 (SEQ ID NO:242), comprising a polypeptide being at least 70%, optionally at least about 80%, preferably at least about 85%, more preferably at least about 90% and most preferably at least about 95% homologous to the sequence VSDRPPSASPKDRNKALGPGQATVL (SEQ ID NO: 647) in HSACMHCP_PEA_{—}1_P6 (SEQ ID NO:242).

[1219] It should be noted that the known protein sequence (MYH6_HUMAN (SEQ ID NO:235)) has one or more changes than the sequence named as being the amino acid sequence for MYH6_HUMAN_V1 (SEQ ID NO:236). These changes were previously known to occur and are listed the 83 table below.

TABLE 83
Changes to MYH6_HUMAN_V1 (SEQ ID NO: 236)

| SNP position(s) on amino | |
|---|---|
| acid sequence | Type of change |
| 89 | Conflict |
| 1735 | Conflict |

[1220] The location of the variant protein was determined according to results from a number of different software programs and analyses, including analyses from SignalP and other specialized programs. The variant protein is believed to be located as follows with regard to the cell: intracellularly.

[1221] The phosphorylation sites of variant protein HSACMHCP_PEA_{—}1_P6 (SEQ ID NO:242), as compared to the known protein Myosin heavy chain (SEQ ID NO:235), cardiac muscle alpha isoform, are described in Table 84 (given according to their position(s) on the amino acid sequence in the first column; the second column indicates whether the phosphorylation site is present in the variant protein; and the last column indicates whether the position is different on the variant protein).

TABLE 84
Phosphorylation site(s)

| Position(s) on known | Present in | Position in |
|---|---|---|
| amino acid sequence | variant protein? | variant protein? |
| 129 | Yes | 129 |

[1222] The variant protein has the following domains, as determined by using InterPro. The domains are described in Table 85:

TABLE 85
InterPro domain(s)

| InterPro ID | Domain description | Analysis type | Position(s) on protein |
|---|---|---|---|
| IPR001609 | Myosin head (motor domain) | FPrintScan | 115-134, 171-196, 226-253, |
| | | | 457-485, 511-539 |
| IPR001609 | Myosin head (motor domain) | HMMPfam | 87-768 |
| IPR002928 | Myosin tail | HMMPfam | 1070-1764 |
| IPR004009 | Myosin N-terminal SH3-like | HMMPfam | 34-77 |
| | domain | | |
| IPR001609 | Myosin head (notor domain) | HMMSmart | 79-781 |
| IPR001609 | Myosin head (motor domain) | BlastProDom | 168-253 |
| IPR000048 | IQ calmodulin-binding region | ProfileScan | 782-812 |

[1223] Variant protein HSACMHCP_PEA_{—}1_P6 (SEQ ID NO:242) is encoded by the following transcript(s): HSACMHCP_PEA_{—}1_T7 (SEQ ID NO:171). The coding portion of transcript HSACMHCP_PEA_{—}1_T7 (SEQ ID NO:171) starts at position 78 and ends at position 5441.

[1224] Variant protein HSACMHCP_PEA_{—}1_P12 (SEQ ID NO:243) according to the present invention has an amino acid sequence; it is encoded by transcript(s) HSACMHCP_PEA_{—}1_T13 (SEQ ID NO:172). An alignment is given to the known protein (Myosin heavy chain (SEQ ID NO:235), cardiac muscle alpha isoform) at the end of the application. One or more alignments to one or more previously published protein sequences are given in the alignment table located on the attached CDROM. A brief description of the relationship of the variant protein according to the present invention to each such aligned protein is as follows:

[1225] Comparison report between HSACMHCP_PEA_{—}1_P12 (SEQ ID NO:243) and MYH6_HUMAN_V3 (SEQ ID NO:238):

[1226] 1. An isolated chimeric polypeptide encoding for HSACMHCP_PEA_{—}1_P12 (SEQ ID NO:243), comprising a first amino acid sequence being at least 70%, optionally at least 80%, preferably at least 85%, more preferably at least 90% and most preferably at least 95% homologous to a polypeptide having the sequence MGLWKPGSVLSDSLFASSPCPQ (SEQ ID NO: 648) corresponding to amino acids 1-22 of HSACMHCP_PEA_{—}1_P12 (SEQ ID NO:243), and a second amino acid sequence being at least 90% homologous to PMGIMSILEEECMFPKATDMTFKAKLYDNHLGKSNNFQKPRNIKGKQEAHFSLIHYAGTVDYNIL GWLEKNKDPLNETVVALYQKSSLKLMATLFSSYATADTGDSGKSKGGKKKGSSFQTVSALHREN LNKLMTNLRTTHPHFVRCIIPNERKAPGVMDNPLVMHQLRCNGVLEGIRICRKGFPNRILYGDFRQ RYRILNPVAIPEGQFIDSRKGTEKLLSSLDIDHNQYKFGHTKVFFKAGLLGLLEEMRDERLSRIITRM QAQARGQLMRIEFKKIVERRDALLVIQWNIRAFMGVKNWPWMKLYFKIKPLLKSAETEKEMATM KEEFGRIKETLEKSEARRKELEEKMVSLLQEKNDLQLQVQAEQDNLNDAEERCDQLIKNKIQLEA KVKEMNERLEDEEEMNAELTAKKRKLEDECSELKKDIDDLELTLAKVEKEKHATENKVKNLTEE MAGLDEIIAKLTKEKKALQEAHQQALDDLQVEEDKVNSLSKSKVKLEQQVDDLEGSLEQEKKVR MDLERAKRKLEGDLKLTQESIMDLENDKLQLEEKLKKKEFDINQQNSKIEDEQALALQLQKKLKE NQARIEELEEELEAERTARAKVEKLRSDLSRELEEISERLEEAGGATSVQIEMNKKREAEFQKMRR DLEEATLQHEATAAALRKKHADSVAELGEQIDNLQRVKQKLEKEKSEFKLELDDVTSNMEQIIKA KANLEKVSRTLEDQANEYRVKLEEAQRSLNDFTTQRAKLQTENGELARQLEEKEALISQLTRGKL SYTQQMEDLKRQLEEEGKAKNALAHALQSARHDCDLLREQYEEETEAKAELQRVLSKANSEVAQ WRTKYETDAIQRTEELEEAKKKLAQRLQDAEEAVEAVNAKCSSLEKTKHRLQNEIEDLMVDVER SNAAAAALDKKQRNFDKILAEWKQKYEESQSELESSQKEARSLSTELFKLKNAYEESLEHLETFKR ENKNLQEEISDLTEQLGEGGKNVHELEKVRKQLEVEKLELQSALEEAEASLEHEEGKILRAQLEFN QIKAEIERKLAEKDEEMEQAKRNHQRVVDSLQTSLDAETRSRNEVLRVKKKMEGDLNEMEIQLSH ANRMAAEAQKQVKSLQSLLKDTQIQLDDAVRANDDLKENIAIVERRNNLLQAELEELRAVVEQTE RSRKLAEQELIETSERVQLLHSQNTSLINQKKKMESDLTQLQSEVEEAVQECRNAEEKAKKAITDA AMMAEELKKEQDTSAHLERMKKNMEQTIKDLQHRLDEAEQIALKGGKKQLQKLEARVRELEGE LEAEQKRNAESVKGMRKSERRIKELTYQTEEDKKNLLRLQDLVDKLQLKVKAYKRQAEEAEEQA NTNLSKFRKVQHELDEAEERADIAESQVNKLRAKSRDIGAKQKMHDEE corresponding to amino acids 528-1939 of MYH6_HUMAN_V3 (SEQ ID NO:238), which also corresponds to amino acids 23-1434 of HSACMHCP_PEA_{—}1_P12 (SEQ ID NO:243), wherein said first amino acid sequence and second amino acid sequence are contiguous and in a sequential order.

[1227] 2. An isolated polypeptide encoding for a head of HSACMHCP_PEA_{—}1_P12 (SEQ ID NO:243), comprising a polypeptide being at least 70%, optionally at least about 80%, preferably at least about 85%, more preferably at least about 90% and most preferably at least about 95% homologous to the sequence MGLWKPGSVLSDSLFASSPCPQ (SEQ ID NO: 648) of HSACMHCP_PEA_{—}1_P12 (SEQ ID NO:243).

[1228] It should be noted that the known protein sequence (MYH6_HUMAN (SEQ ID NO:235)) has one or more changes than the sequence named as being the amino acid sequence for MYH6_HUMAN_V3 (SEQ ID NO:238). These changes were previously known to occur and are listed in table 86 below.

TABLE 86
Changes to MYH6_HUMAN_V3 (SEQ ID NO: 238)

| SNP position(s) on amino | |
|---|---|
| acid sequence | Type of change |
| 1735 | Conflict |

[1229] The location of the variant protein was determined according to results from a number of different software programs and analyses, including analyses from SignalP and other specialized programs. The variant protein is believed to be located as follows with regard to the cell: intracellularly.

[1230] The phosphorylation sites of variant protein HSACMHCP_PEA_{—}1_P12 (SEQ ID NO:243), as compared to the known protein Myosin heavy chain (SEQ ID NO:235), cardiac muscle alpha isoform, are described in Table 87 (given according to their position(s) on the amino acid sequence in the first column; the second column indicates whether the phosphorylation site is present in the variant protein; and the last column indicates whether the position is different on the variant protein).

TABLE 87
Phosphorylation site(s)

| Position(s) on known | Present in | Position in |
|---|---|---|
| amino acid sequence | variant protein? | variant protein? |
| 129 | No | |

[1231] The variant protein has the following domains, as determined by using InterPro. The domains are described in Table 88:

TABLE 88
InterPro domain(s)

| | Domain | | Position(s) |
|---|---|---|---|
| InterPro ID | description | Analysis type | on protein |
| IPR000533 | Tropomyosin | FPrintScan | 1308-1325, 1337-1357, |
| | | | 1369-1397, 1399-1422 |
| IPR001609 | Myosin head | HMMPfam | 22-263 |
| | (motor domain) | | |
| IPR002928 | Myosin tail | HMMPfam | 565-1424 |
| IPR001609 | Myosin head | HMMSmart | 1-276 |
| | (motor domain) | | |
| IPR000048 | IQ calmodulin- | ProfileScan | 278-307 |
| | binding region | | |

[1232] Variant protein HSACMHCP_PEA_{—}1_P12 (SEQ ID NO:243) is encoded by the following transcript(s): HSACMHCP_PEA_{—}1_T13 (SEQ ID NO:172). The coding portion of transcript HSACMHCP_PEA_{—}1_T13 (SEQ ID NO:172) starts at position 67 and ends at position 4368.

[1233] Variant protein HSACMHCP_PEA_{—}1_P16 (SEQ ID NO:244) according to the present invention has an amino acid sequence; it is encoded by transcript(s) HSACMHCP_PEA_{—}1_T17 (SEQ ID NO:173). An alignment is given to the known protein (Myosin heavy chain (SEQ ID NO:235), cardiac muscle alpha isoform) at the end of the application. One or more alignments to one or more previously published protein sequences are in the alignment table located on the attached CDROM. A brief description of the relationship of the variant protein according to the present invention to each such aligned protein is as follows:

[1234] Comparison report between HSACMHCP_PEA_{—}1_P16 (SEQ ID NO:244) and MYH6_HUMAN_V2 (SEQ ID NO:237):

[1235] 1. An isolated chimeric polypeptide encoding for HSACMHCP_PEA_{—}1_P16 (SEQ ID NO:244), comprising a first amino acid sequence being at least 90% homologous to MTDAQMADFGAAAQYLRKSEKERLEAQTRPFDIRTECFVPDDKEEFVKAKILSREGGKVIAETEN GKTVTVKEDQVLQQNPPKFDKIEDMAMLTFLHEPAVLFNLKERYAAWMIYTYSGLFCVTVNPYK WLPVYNAEVVAAYRGKKRSEAPPHIFSISDNAYQYMLTDRENQSILITGESGAGKTVNTKRVIQYF ASIAAIGDRGKKDNANANKGTLEDQIIQANPALEAFGNAKTVRNDNSSRFGKFIRIHFGATGKLAS ADIETYLLEKSRVIFQLKAERNYHIFYQILSNKKPELLDMLLVTNNPYDYAFVSQGEVSVASIDDSE ELMATDSAFDVLGFTSEEKAGVYKLTGAIMHYGNMKFKQKQREEQAEPDGTEDADKSAYLMGL NSADLLKGLCHPRVKVGNEYVTKGQSVQQVYYSIGALAKAVYEKMFNWMVTRINATLETKQPR QYFIGVLDIAGFEIFDFNSFEQLCINFTNEKLQQFFNHHMFVLEQEEYKKEGIEWTFIDFGMDLQACI DLIEK corresponding to amino acids 1-527 of MYH6_HUMAN_V2 (SEQ ID NO:237), which also corresponds to amino acids 1-527 of HSACMHCP_PEA_{—}1_P16 (SEQ ID NO:244), and a second amino acid sequence being at least 70%, optionally at least 80%, preferably at least 85%, more preferably at least 90% and most preferably at least 95% homologous to a polypeptide having the sequence VPPWPHHLCPLLCHPDKVVAESLLHPRN (SEQ ID NO: 649) corresponding to amino acids 528-555 of HSACMHCP_PEA_{—}1_P16 (SEQ ID NO:244), wherein said first amino acid sequence and second amino acid sequence are contiguous and in a sequential order.

[1236] 2. An isolated polypeptide encoding for a tail of HSACMHCP_PEA_{—}1_P16 (SEQ ID NO:244), comprising a polypeptide being at least 70%, optionally at least about 80%, preferably at least about 85%, more preferably at least about 90% and most preferably at least about 95% homologous to the sequence VPPWPHHLCPLLCHPDKVVAESLLHPRN (SEQ ID NO: 649) in HSACMHCP_PEA_{—}1_P16 (SEQ ID NO:244).

[1237] It should be noted that the known protein sequence (MYH6_HUMAN (SEQ ID NO:235)) has one or more changes than the sequence named as being the amino acid sequence for MYH6_HUMAN_V2 (SEQ ID NO:237). These changes were previously known to occur and are listed in table 89 below.

TABLE 89
Changes to MYH6_HUMAN_V2 (SEQ ID NO: 237)

| SNP position(s) on amino | |
|---|---|
| acid sequence | Type of change |
| 89 | conflict |

[1238] The location of the variant protein was determined according to results from a number of different software programs and analyses, including analyses from SignalP and other specialized programs. The variant protein is believed to be located as follows with regard to the cell: intracellularly.

[1239] The phosphorylation sites of variant protein HSACMHCP_PEA_{—}1_P16 (SEQ ID NO:244), as compared to the known protein Myosin heavy chain (SEQ ID NO:235), cardiac muscle alpha isoform, are described in Table 90 (given according to their position(s) on the amino acid sequence in the first column; the second column indicates whether the phosphorylation site is present in the variant protein; and the last column indicates whether the position is different on the variant protein).

TABLE 90
Phosphorylation site(s)

| Position(s) on known | Present in | Position in |
|---|---|---|
| amino acid sequence | variant protein? | variant protein? |
| 129 | yes | 129 |

[1240] The variant protein has the following domains, as determined by using InterPro. The domains are described in Table 91:

TABLE 91
InterPro domain(s)

| | Domain | | Position(s) |
|---|---|---|---|
| InterPro ID | description | Analysis type | on protein |
| IPR001609 | Myosin head | FPrintScan | 115-134, 171-196, |
| | (motor domain) | | 226-253, 457-485, |
| | | | 511-539 |
| IPR001609 | Myosin head | HMMPfam | 87-530 |
| | (motor domain) | | |
| IPR004009 | Myosin N-terminal | HMMPfam | 34-77 |
| | SH3-like domain | | |
| IPR001609 | Myosin head | HMMSmart | 79-554 |
| | (motor domain) | | |
| IPR001609 | Myosin head | BlastProDom | 168-253 |
| | (motor domain) | | |

[1241] Variant protein HSACMHCP_PEA_{—}1_P16 (SEQ ID NO:244) is encoded by the following transcript(s): HSACMHCP_PEA_{—}1_T17 (SEQ ID NO:173). The coding portion of transcript HSACMHCP_PEA_{—}1_T17 (SEQ ID NO:173) starts at position 78 and ends at position 1742.

[1242] Table 92 below describes the starting and ending position of HSACMHCP_PEA_{—}1_node_{—}46 (SEQ ID NO:179) on the relevant transcript. Experimental results for this segment are described below.

TABLE 92
Segment location on transcripts

| | Segment | Segment |
|---|---|---|
| Transcript name | starting position | ending position |
| HSACMHCP_PEA_1_T17 | 1659 | 2477 |
| (SEQ ID NO: 173) | | |

[1243] Table 93 below describes the starting and ending position of HSACMHCP_PEA_{—}1_node_{—}106 (SEQ ID NO:196) on each of the relevant transcripts. Experimental results for this segment are described below.

TABLE 93
Segment location on transcripts

| | Segment | Segment |
|---|---|---|
| Transcript name | starting position | ending position |
| HSACMHCP_PEA_1_T2 | 5367 | 5642 |
| (SEQ ID NO: 167) | | |
| HSACMHCP_PEA_1_T3 | 5704 | 5979 |
| (SEQ ID NO: 168) | | |
| HSACMHCP_PEA_1_T4 | 5471 | 5746 |
| (SEQ ID NO: 169) | | |
| HSACMHCP_PEA_1_T6 | 5367 | 5642 |
| (SEQ ID NO: 170) | | |
| HSACMHCP_PEA_1_T7 | 5565 | 5840 |
| (SEQ ID NO: 171) | | |
| HSACMHCP_PEA_1_T13 | 3841 | 4116 |
| (SEQ ID NO: 172) | | |

Expression of Homo sapiens myosin, heavy polypeptide 6, cardiac muscle, alpha (cardiomyopathy, hypertrophic 1) (MYH6) HSACMHCP transcripts which are detectable by amplicon as depicted in sequence name HSACMHCP seg106 (SEQ ID NO: 247) specifically in heart tissue:

[1244] Expression of Homo sapiens myosin, heavy polypeptide 6, cardiac muscle, alpha (cardiomyopathy, hypertrophic 1) (MYH6) transcripts detectable by or according to seg106—HSACMHCP seg106 (SEQ ID NO: 247) amplicon and primers HSACMHCP seg106F (SEQ ID NO: 245) and HSACMHCP seg106R (SEQ ID NO: 246) was measured by real time PCR. In parallel the expression of four housekeeping genes—RPL19 (GenBank Accession No. NM_{—}000981 (SEQ ID NO:7); RPL19 amplicon (SEQ ID NO: 38)), TATA box (GenBank Accession No. NM_{—}003194 (SEQ ID NO:2); TATA amplicon (SEQ ID NO: 53)), Ubiquitin (GenBank Accession No. BC000449 (SEQ ID NO:9); amplicon—Ubiquitin-amplicon (SEQ ID NO:50)) and SDHA (GenBank Accession No. NM_{—}004168 (SEQ ID NO:4); amplicon—SDHA-amplicon (SEQ ID NO:29)), was measured similarly. For each RT sample, the expression of the above amplicons was normalized to the geometric mean of the quantities of the housekeeping genes. The normalized quantity of each RT sample was then divided by the median of the quantities of the heart samples (Sample Nos. 44-46, Table 7, above, “Tissue samples in normal panel”), to obtain a value of relative expression for each sample relative to median of the heart samples.

[1245] FIG. 27 is a histogram showing relative expression of the above-indicated Homo sapiens myosin, heavy polypeptide 6, cardiac muscle, alpha (cardiomyopathy, hypertrophic 1) (MYH6) transcripts in heart tissue samples as opposed to other tissues. Values represent the average of duplicate experiments. Error bars indicate the minimal and maximal values obtained

[1246] As is evident from FIG. 27, the expression of Homo sapiens myosin, heavy polypeptide 6, cardiac muscle, alpha (cardiomyopathy, hypertrophic 1) (MYH6) transcripts detectable by the above amplicon in heart tissue samples was significantly higher than in most of the other samples (Sample Nos. 1-43, 47-72 Table 7, “Tissue samples in normal panel”), except for the skeletal muscle samples.

[1247] Primer pairs are also optionally and preferably encompassed within the present invention; for example, for the above experiment, the following primer pair was used as a non-limiting illustrative example only of a suitable primer pair: HSACMHCP seg106F (SEQ ID NO: 245) forward primer; and HSACMHCP seg106R (SEQ ID NO: 246) reverse primer.

[1248] The present invention also preferably encompasses any amplicon obtained through the use of any suitable primer pair; for example, for the above experiment, the following amplicon was obtained as a non-limiting illustrative example only of a suitable amplicon: HSACMHCP seg106 (SEQ ID NO: 247).

[1249] Primers:

[1250] Forward primer HSACMHCP seg106F (SEQ ID NO:245): CCGCCATGATGGCAGAG Reverse primer HSACMHCP seg106R (SEQ ID NO:246): CCGGTGCTGCAGGTCCT Amplicon HSACMHCP seg106 (SEQ ID NO:247): CCGCCATGATGGCAGAGGAGCTGAAGAAGGAGCAGGACACCAGCGCCCACCTGGAGCGCATG AAGAAGAACATGGAGCAGACCATTAAGGACCTGCAGCACCGG

Expression of HSACMHCP HSACMHCP transcripts which are detectable by amplicon as depicted in sequence name HSACMHCP seg46 (SEQ ID NO:250) specifically in heart tissue: Expression of HSACMHCP transcripts detectable by or according to seg46-HSACMHCP seg46 (SEQ ID NO:250) amplicon and primers HSACMHCP seg46F (SEQ ID NO:248) and HSACMHCP seg46R (SEQ ID NO:249) was measured by real time PCR. In parallel the expression of four housekeeping genes—RPL19 (GenBank Accession No. NM_{—}000981 (SEQ ID NO:7); RPL19 amplicon (SEQ ID NO: 38)), TATA box (GenBank Accession No. NM_{—}003194 (SEQ ID NO:2); TATA amplicon (SEQ ID NO: 53)), Ubiquitin (GenBank Accession No. BC000449 (SEQ ID NO:9); amplicon—Ubiquitin-amplicon (SEQ ID NO:50)) and SDHA (GenBank Accession No. NM_{—}004168 (SEQ ID NO:4); amplicon—SDHA-amplicon (SEQ ID NO:29)), was measured similarly. For each RT sample, the expression of the above amplicons was normalized to the geometric mean of the quantities of the housekeeping genes. The normalized quantity of each RT sample was then divided by the median of the quantities of the heart samples (Sample Nos. 44-46, Table 7, above, “Tissue samples in normal panel”), to obtain a value of relative expression for each sample relative to median of the heart samples.

[1251] FIG. 28 is a histogram showing relative expression of the above-indicated HSACMHCP transcripts in heart tissue samples as opposed to other tissues. Values represent the average of duplicate experiments. Error bars indicate the minimal and maximal values obtained

[1252] As is evident from FIG. 28, the expression of HSACMHCP transcripts detectable by the above amplicon in heart tissue samples was significantly higher than in the other samples (Sample Nos. 1-43, 47-74 Table 7, “Tissue samples in normal panel”), including the skeletal muscle samples.

[1253] Primer pairs are also optionally and preferably encompassed within the present invention; for example, for the above experiment, the following primer pair was used as a non-limiting illustrative example only of a suitable primer pair: HSACMHCP seg46F (SEQ ID NO:248) forward primer; and HSACMHCP seg46R (SEQ ID NO:249) reverse primer.

[1254] The present invention also preferably encompasses any amplicon obtained through the use of any suitable primer pair; for example, for the above experiment, the following amplicon was obtained as a non-limiting illustrative example only of a suitable amplicon: HSACMHCP seg46 (SEQ ID NO:250).

[1255] Primers:

| | |
|---|---|
| Forward primer HSACMHCP seg46F: | (SEQ ID NO: 248) |
| CTTTCTCCAGGCCCAGCTTC | |
| Reverse primer HSACMHCP seg46R: | (SEQ ID NO: 249) |
| AAAGTGCAAGGTCCTGGGAA | |
| Amplicon HSACMHCP seg46: | (SEQ ID NO: 250) |

CTTTCTCCAGGCCCAGCTTCTCCCCACTGTGAAGTCATGGGCATGAACAGGATGATCCCCCCA
CTCTTCCTTTCCCAGGACCTTGCACTTT

### Description for Cluster HSCREACT

[1256] Cluster HSCREACT features 10 transcript(s) and 55 segment(s) of interest, the names for which are given in Tables 94 and 95 respectively. The selected protein variants are given in table 96.

TABLE 94
Transcripts of interest
Transcript Name

HSCREACT_PEA_1_T12 (SEQ ID NO: 251)
HSCREACT_PEA_1_T13 (SEQ ID NO: 252)
HSCREACT_PEA_1_T15 (SEQ ID NO: 253)
HSCREACT_PEA_1_T22 (SEQ ID NO: 254)
HSCREACT_PEA_1_T29 (SEQ ID NO: 255)
HSCREACT_PEA_1_T30 (SEQ ID NO: 256)
HSCREACT_PEA_1_T32 (SEQ ID NO: 257)
HSCREACT_PEA_1_T33 (SEQ ID NO: 258)
HSCREACT_PEA_1_T38 (SEQ ID NO: 259)
HSCREACT_PEA_1_T39 (SEQ ID NO: 260)

TABLE 95
Segments of interest

| Segment Name | Corresponding Transcript(s) |
|---|---|
| HSCREACT_PEA_1_node_63 (SEQ ID NO: 261) | HSCREACT_PEA_1_T12 (SEQ ID |
| | NO: 251), HSCREACT_PEA_1_T13 |
| | (SEQ ID NO: 252), |
| | HSCREACT_PEA_1_T15 (SEQ ID |
| | NO: 253), HSCREACT_PEA_1_T22 |
| | (SEQ ID NO: 254), |
| | HSCREACT_PEA_1_T29 (SEQ ID |
| | NO: 255), HSCREACT_PEA_1_T30 |
| | (SEQ ID NO: 256), |
| | HSCREACT_PEA_1_T32 (SEQ ID |
| | NO: 257), HSCREACT_PEA_1_T33 |
| | (SEQ ID NO: 258), |
| | HSCREACT_PEA_1_T38 (SEQ ID |
| | NO: 259) and HSCREACT_PEA_1_T39 |
| | (SEQ ID NO: 260) |
| HSCREACT_PEA_1_node_2 (SEQ ID NO: 262) | HSCREACT_PEA_1_T12 (SEQ ID |
| | NO: 251), HSCREACT_PEA_1_T13 |
| | (SEQ ID NO: 252), |
| | HSCREACT_PEA_1_T15 (SEQ ID |
| | NO: 253), HSCREACT_PEA_1_T22 |
| | (SEQ ID NO: 254), |
| | HSCREACT_PEA_1_T29 (SEQ ID |
| | NO: 255), HSCREACT_PEA_1_T30 |
| | (SEQ ID NO: 256), |
| | HSCREACT_PEA_1_T32 (SEQ ID |
| | NO: 257), HSCREACT_PEA_1_T33 |
| | (SEQ ID NO: 258), |
| | HSCREACT_PEA_1_T38 (SEQ ID |
| | NO: 259) and HSCREACT_PEA_1_T39 |
| | (SEQ ID NO: 260) |
| HSCREACT_PEA_1_node_3 (SEQ ID NO: 263) | HSCREACT_PEA_1_T12 (SEQ ID |
| | NO: 251), HSCREACT_PEA_1_T13 |
| | (SEQ ID NO: 252), |
| | HSCREACT_PEA_1_T15 (SEQ ID |
| | NO: 253), HSCREACT_PEA_1_T22 |
| | (SEQ ID NO: 254), |
| | HSCREACT_PEA_1_T29 (SEQ ID |
| | NO: 255), HSCREACT_PEA_1_T30 |
| | (SEQ ID NO: 256), |
| | HSCREACT_PEA_1_T32 (SEQ ID |
| | NO: 257), HSCREACT_PEA_1_T33 |
| | (SEQ ID NO: 258), |
| | HSCREACT_PEA_1_T38 (SEQ ID |
| | NO: 259) and HSCREACT_PEA_1_T39 |
| | (SEQ ID NO: 260) |
| HSCREACT_PEA_1_node_4 (SEQ ID NO: 264) | HSCREACT_PEA_1_T12 (SEQ ID |
| | NO: 251), HSCREACT_PEA_1_T13 |
| | (SEQ ID NO: 252), |
| | HSCREACT_PEA_1_T15 (SEQ ID |
| | NO: 253), HSCREACT_PEA_1_T22 |
| | (SEQ ID NO: 254), |
| | HSCREACT_PEA_1_T29 (SEQ ID |
| | NO: 255), HSCREACT_PEA_1_T30 |
| | (SEQ ID NO: 256), |
| | HSCREACT_PEA_1_T32 (SEQ ID |
| | NO: 257), HSCREACT_PEA_1_T33 |
| | (SEQ ID NO: 258), |
| | HSCREACT_PEA_1_T38 (SEQ ID |
| | NO: 259) and HSCREACT_PEA_1_T39 |
| | (SEQ ID NO: 260) |
| HSCREACT_PEA_1_node_5 (SEQ ID NO: 265) | HSCREACT_PEA_1_T12 (SEQ ID |
| | NO: 251), HSCREACT_PEA_1_T13 |
| | (SEQ ID NO: 252), |
| | HSCREACT_PEA_1_T15 (SEQ ID |
| | NO: 253), HSCREACT_PEA_1_T22 |
| | (SEQ ID NO: 254), |
| | HSCREACT_PEA_1_T29 (SEQ ID |
| | NO: 255), HSCREACT_PEA_1_T30 |
| | (SEQ ID NO: 256), |
| | HSCREACT_PEA_1_T32 (SEQ ID |
| | NO: 257), HSCREACT_PEA_1_T33 |
| | (SEQ ID NO: 258), |
| | HSCREACT_PEA_1_T38 (SEQ ID |
| | NO: 259) and HSCREACT_PEA_1_T39 |
| | (SEQ ID NO: 260) |
| HSCREACT_PEA_1_node_8 (SEQ ID NO: 266) | HSCREACT_PEA_1_T12 (SEQ ID |
| | NO: 251), HSCREACT_PEA_1_T13 |
| | (SEQ ID NO: 252), |
| | HSCREACT_PEA_1_T15 (SEQ ID |
| | NO: 253), HSCREACT_PEA_1_T22 |
| | (SEQ ID NO: 254), |
| | HSCREACT_PEA_1_T29 (SEQ ID |
| | NO: 255), HSCREACT_PEA_1_T30 |
| | (SEQ ID NO: 256), |
| | HSCREACT_PEA_1_T32 (SEQ ID |
| | NO: 257), HSCREACT_PEA_1_T33 |
| | (SEQ ID NO: 258), |
| | HSCREACT_PEA_1_T38 (SEQ ID |
| | NO: 259) and HSCREACT_PEA_1_T39 |
| | (SEQ ID NO: 260) |
| HSCREACT_PEA_1_node_9 (SEQ ID NO: 267) | HSCREACT_PEA_1_T12 (SEQ ID |
| | NO: 251), HSCREACT_PEA_1_T13 |
| | (SEQ ID NO: 252), |
| | HSCREACT_PEA_1_T15 (SEQ ID |
| | NO: 253), HSCREACT_PEA_1_T22 |
| | (SEQ ID NO: 254), |
| | HSCREACT_PEA_1_T29 (SEQ ID |
| | NO: 255), HSCREACT_PEA_1_T30 |
| | (SEQ ID NO: 256), |
| | HSCREACT_PEA_1_T32 (SEQ ID |
| | NO: 257), HSCREACT_PEA_1_T33 |
| | (SEQ ID NO: 258), |
| | HSCREACT_PEA_1_T38 (SEQ ID |
| | NO: 259) and HSCREACT_PEA_1_T39 |
| | (SEQ ID NO: 260) |
| HSCREACT_PEA_1_node_10 (SEQ ID NO: 268) | HSCREACT_PEA_1_T12 (SEQ ID |
| | NO: 251), HSCREACT_PEA_1_T13 |
| | (SEQ ID NO: 252), |
| | HSCREACT_PEA_1_T15 (SEQ ID |
| | NO: 253), HSCREACT_PEA_1_T22 |
| | (SEQ ID NO: 254), |
| | HSCREACT_PEA_1_T29 (SEQ ID |
| | NO: 255), HSCREACT_PEA_1_T30 |
| | (SEQ ID NO: 256), |
| | HSCREACT_PEA_1_T32 (SEQ ID |
| | NO: 257), HSCREACT_PEA_1_T33 |
| | (SEQ ID NO: 258), |
| | HSCREACT_PEA_1_T38 (SEQ ID |
| | NO: 259) and HSCREACT_PEA_1_T39 |
| | (SEQ ID NO: 260) |
| HSCREACT_PEA_1_node_11 (SEQ ID NO: 269) | HSCREACT_PEA_1_T12 (SEQ ID |
| | NO: 251), HSCREACT_PEA_1_T13 |
| | (SEQ ID NO: 252), |
| | HSCREACT_PEA_1_T15 (SEQ ID |
| | NO: 253), HSCREACT_PEA_1_T22 |
| | (SEQ ID NO: 254), |
| | HSCREACT_PEA_1_T29 (SEQ ID |
| | NO: 255), HSCREACT_PEA_1_T30 |
| | (SEQ ID NO: 256), |
| | HSCREACT_PEA_1_T32 (SEQ ID |
| | NO: 257), HSCREACT_PEA_1_T33 |
| | (SEQ ID NO: 258), |
| | HSCREACT_PEA_1_T38 (SEQ ID |
| | NO: 259) and HSCREACT_PEA_1_T39 |
| | (SEQ ID NO: 260) |
| HSCREACT_PEA_1_node_12 (SEQ ID NO: 270) | HSCREACT_PEA_1_T13 (SEQ ID |
| | NO: 252), HSCREACT_PEA_1_T15 |
| | (SEQ ID NO: 253), |
| | HSCREACT_PEA_1_T22 (SEQ ID |
| | NO: 254), HSCREACT_PEA_1_T29 |
| | (SEQ ID NO: 255), |
| | HSCREACT_PEA_1_T30 (SEQ ID |
| | NO: 256) and HSCREACT_PEA_1_T38 |
| | (SEQ ID NO: 259) |
| HSCREACT_PEA_1_node_13 (SEQ ID NO: 271) | HSCREACT_PEA_1_T22 (SEQ ID |
| | NO: 254) |
| HSCREACT_PEA_1_node_14 (SEQ ID NO: 272) | HSCREACT_PEA_1_T22 (SEQ ID |
| | NO: 254) |
| HSCREACT_PEA_1_node_15 (SEQ ID NO: 273) | HSCREACT_PEA_1_T22 (SEQ ID |
| | NO: 254) |
| HSCREACT_PEA_1_node_16 (SEQ ID NO: 274) | HSCREACT_PEA_1_T22 (SEQ ID |
| | NO: 254) |
| HSCREACT_PEA_1_node_17 (SEQ ID NO: 275) | HSCREACT_PEA_1_T22 (SEQ ID |
| | NO: 254) |
| HSCREACT_PEA_1_node_18 (SEQ ID NO: 276) | HSCREACT_PEA_1_T22 (SEQ ID |
| | NO: 254) |
| HSCREACT_PEA_1_node_19 (SEQ ID NO: 277) | HSCREACT_PEA_1_T22 (SEQ ID |
| | NO: 254) |
| HSCREACT_PEA_1_node_20 (SEQ ID NO: 278) | HSCREACT_PEA_1_T22 (SEQ ID |
| | NO: 254) |
| HSCREACT_PEA_1_node_21 (SEQ ID NO: 279) | HSCREACT_PEA_1_T22 (SEQ ID |
| | NO: 254) |
| HSCREACT_PEA_1_node_22 (SEQ ID NO: 280) | HSCREACT_PEA_1_T22 (SEQ ID |
| | NO: 254) |
| HSCREACT_PEA_1_node_23 (SEQ ID NO: 281) | HSCREACT_PEA_1_T22 (SEQ ID |
| | NO: 254) |
| HSCREACT_PEA_1_node_24 (SEQ ID NO: 282) | HSCREACT_PEA_1_T22 (SEQ ID |
| | NO: 254) |
| HSCREACT_PEA_1_node_30 (SEQ ID NO: 283) | HSCREACT_PEA_1_T12 (SEQ ID |
| | NO: 251), HSCREACT_PEA_1_T13 |
| | (SEQ ID NO: 252), |
| | HSCREACT_PEA_1_T32 (SEQ ID |
| | NO: 257) and HSCREACT_PEA_1_T39 |
| | (SEQ ID NO: 260) |
| HSCREACT_PEA_1_node_31 (SEQ ID NO: 284) | HSCREACT_PEA_1_T12 (SEQ ID |
| | NO: 251), HSCREACT_PEA_1_T13 |
| | (SEQ ID NO: 252), |
| | HSCREACT_PEA_1_T15 (SEQ ID |
| | NO: 253), HSCREACT_PEA_1_T30 |
| | (SEQ ID NO: 256), |
| | HSCREACT_PEA_1_T32 (SEQ ID |
| | NO: 257), HSCREACT_PEA_1_T38 |
| | (SEQ ID NO: 259) and |
| | HSCREACT_PEA_1_T39 (SEQ ID |
| | NO: 260) |
| HSCREACT_PEA_1_node_32 (SEQ ID NO: 285) | HSCREACT_PEA_1_T12 (SEQ ID |
| | NO: 251), HSCREACT_PEA_1_T13 |
| | (SEQ ID NO: 252), |
| | HSCREACT_PEA_1_T15 (SEQ ID |
| | NO: 253), HSCREACT_PEA_1_T30 |
| | (SEQ ID NO: 256), |
| | HSCREACT_PEA_1_T32 (SEQ ID |
| | NO: 257), HSCREACT_PEA_1_T38 |
| | (SEQ ID NO: 259) and |
| | HSCREACT_PEA_1_T39 (SEQ ID |
| | NO: 260) |
| HSCREACT_PEA_1_node_33 (SEQ ID NO: 286) | HSCREACT_PEA_1_T12 (SEQ ID |
| | NO: 251), HSCREACT_PEA_1_T13 |
| | (SEQ ID NO: 252), |
| | HSCREACT_PEA_1_T15 (SEQ ID |
| | NO: 253), HSCREACT_PEA_1_T30 |
| | (SEQ ID NO: 256), |
| | HSCREACT_PEA_1_T32 (SEQ ID |
| | NO: 257), HSCREACT_PEA_1_T38 |
| | (SEQ ID NO: 259) and |
| | HSCREACT_PEA_1_T39 (SEQ ID |
| | NO: 260) |
| HSCREACT_PEA_1_node_34 (SEQ ID NO: 287) | HSCREACT_PEA_1_T12 (SEQ ID |
| | NO: 251), HSCREACT_PEA_1_T13 |
| | (SEQ ID NO: 252), |
| | HSCREACT_PEA_1_T15 (SEQ ID |
| | NO: 253), HSCREACT_PEA_1_T30 |
| | (SEQ ID NO: 256), |
| | HSCREACT_PEA_1_T32 (SEQ ID |
| | NO: 257), HSCREACT_PEA_1_T38 |
| | (SEQ ID NO: 259) and |
| | HSCREACT_PEA_1_T39 (SEQ ID |
| | NO: 260) |
| HSCREACT_PEA_1_node_35 (SEQ ID NO: 288) | HSCREACT_PEA_1_T12 (SEQ ID |
| | NO: 251), HSCREACT_PEA_1_T13 |
| | (SEQ ID NO: 252), |
| | HSCREACT_PEA_1_T15 (SEQ ID |
| | NO: 253), HSCREACT_PEA_1_T30 |
| | (SEQ ID NO: 256), |
| | HSCREACT_PEA_1_T32 (SEQ ID |
| | NO: 257), HSCREACT_PEA_1_T38 |
| | (SEQ ID NO: 259) and |
| | HSCREACT_PEA_1_T39 (SEQ ID |
| | NO: 260) |
| HSCREACT_PEA_1_node_36 (SEQ ID NO: 289) | HSCREACT_PEA_1_T12 (SEQ ID |
| | NO: 251), HSCREACT_PEA_1_T13 |
| | (SEQ ID NO: 252) and |
| | HSCREACT_PEA_1_T15 (SEQ ID |
| | NO: 253) |
| HSCREACT_PEA_1_node_37 (SEQ ID NO: 290) | HSCREACT_PEA_1_T12 (SEQ ID |
| | NO: 251), HSCREACT_PEA_1_T13 |
| | (SEQ ID NO: 252) and |
| | HSCREACT_PEA_1_T15 (SEQ ID |
| | NO: 253) |
| HSCREACT_PEA_1_node_38 (SEQ ID NO: 291) | HSCREACT_PEA_1_T12 (SEQ ID |
| | NO: 251), HSCREACT_PEA_1_T13 |
| | (SEQ ID NO: 252) and |
| | HSCREACT_PEA_1_T15 (SEQ ID |
| | NO: 253) |
| HSCREACT_PEA_1_node_39 (SEQ ID NO: 292) | HSCREACT_PEA_1_T12 (SEQ ID |
| | NO: 251), HSCREACT_PEA_1_T13 |
| | (SEQ ID NO: 252) and |
| | HSCREACT_PEA_1_T15 (SEQ ID |
| | NO: 253) |
| HSCREACT_PEA_1_node_40 (SEQ ID NO: 293) | HSCREACT_PEA_1_T12 (SEQ ID |
| | NO: 251), HSCREACT_PEA_1_T13 |
| | (SEQ ID NO: 252) and |
| | HSCREACT_PEA_1_T15 (SEQ ID |
| | NO: 253) |
| HSCREACT_PEA_1_node_41 (SEQ ID NO: 294) | HSCREACT_PEA_1_T12 (SEQ ID |
| | NO: 251), HSCREACT_PEA_1_T13 |
| | (SEQ ID NO: 252) and |
| | HSCREACT_PEA_1_T15 (SEQ ID |
| | NO: 253). |
| HSCREACT_PEA_1_node_42 (SEQ ID NO: 295) | HSCREACT_PEA_1_T12 (SEQ ID |
| | NO: 251), HSCREACT_PEA_1_T13 |
| | (SEQ ID NO: 252) and |
| | HSCREACT_PEA_1_T15 (SEQ ID |
| | NO: 253) |
| HSCREACT_PEA_1_node_43 (SEQ ID NO: 296) | HSCREACT_PEA_1_T12 (SEQ ID |
| | NO: 251), HSCREACT_PEA_1_T13 |
| | (SEQ ID NO: 252) and |
| | HSCREACT_PEA_1_T15 (SEQ ID |
| | NO: 253) |
| HSCREACT_PEA_1_node_44 (SEQ ID NO: 297) | HSCREACT_PEA_1_T12 (SEQ ID |
| | NO: 251), HSCREACT_PEA_1_T13 |
| | (SEQ ID NO: 252) and |
| | HSCREACT_PEA_1_T15 (SEQ ID |
| | NO: 253) |
| HSCREACT_PEA_1_node_45 (SEQ ID NO: 298) | HSCREACT_PEA_1_T12 (SEQ ID |
| | NO: 251), HSCREACT_PEA_1_T13 |
| | (SEQ ID NO: 252) and |
| | HSCREACT_PEA_1_T15 (SEQ ID |
| | NO: 253) |
| HSCREACT_PEA_1_node_46 (SEQ ID NO: 299) | HSCREACT_PEA_1_T12 (SEQ ID |
| | NO: 251), HSCREACT_PEA_1_T13 |
| | (SEQ ID NO: 252) and |
| | HSCREACT_PEA_1_T15 (SEQ ID |
| | NO: 253) |
| HSCREACT_PEA_1_node_47 (SEQ ID NO: 300) | HSCREACT_PEA_1_T12 (SEQ ID |
| | NO: 251), HSCREACT_PEA_1_T13 |
| | (SEQ ID NO: 252), |
| | HSCREACT_PEA_1_T15 (SEQ ID |
| | NO: 253) and HSCREACT_PEA_1_T22 |
| | (SEQ ID NO: 254) |
| HSCREACT_PEA_1_node_48 (SEQ ID NO: 301) | HSCREACT_PEA_1_T12 (SEQ ID |
| | NO: 251), HSCREACT_PEA_1_T13 |
| | (SEQ ID NO: 252), |
| | HSCREACT_PEA_1_T15 (SEQ ID |
| | NO: 253) and HSCREACT_PEA_1_T22 |
| | (SEQ ID NO: 254) |
| HSCREACT_PEA_1_node_49 (SEQ ID NO: 302) | HSCREACT_PEA_1_T12 (SEQ ID |
| | NO: 251), HSCREACT_PEA_1_T13 |
| | (SEQ ID NO: 252), |
| | HSCREACT_PEA_1_T15 (SEQ ID |
| | NO: 253) and HSCREACT_PEA_1_T22 |
| | (SEQ ID NO: 254) |
| HSCREACT_PEA_1_node_50 (SEQ ID NO: 303) | HSCREACT_PEA_1_T12 (SEQ ID |
| | NO: 251), HSCREACT_PEA_1_T13 |
| | (SEQ ID NO: 252), |
| | HSCREACT_PEA_1_T15 (SEQ ID |
| | NO: 253) and HSCREACT_PEA_1_T22 |
| | (SEQ ID NO: 254) |
| HSCREACT_PEA_1_node_51 (SEQ ID NO: 304) | HSCREACT_PEA_1_T12 (SEQ ID |
| | NO: 251), HSCREACT_PEA_1_T13 |
| | (SEQ ID NO: 252), |
| | HSCREACT_PEA_1_T15 (SEQ ID |
| | NO: 253) and HSCREACT_PEA_1_T22 |
| | (SEQ ID NO: 254) |
| HSCREACT_PEA_1_node_52 (SEQ ID NO: 305) | HSCREACT_PEA_1_T12 (SEQ ID |
| | NO: 251), HSCREACT_PEA_1_T13 |
| | (SEQ ID NO: 252), |
| | HSCREACT_PEA_1_T15 (SEQ ID |
| | NO: 253) and HSCREACT_PEA_1_T22 |
| | (SEQ ID NO: 254) |
| HSCREACT_PEA_1_node_53 (SEQ ID NO: 306) | HSCREACT_PEA_1_T12 (SEQ ID |
| | NO: 251), HSCREACT_PEA_1_T13 |
| | (SEQ ID NO: 252), |
| | HSCREACT_PEA_1_T15 (SEQ ID |
| | NO: 253), HSCREACT_PEA_1_T22 |
| | (SEQ ID NO: 254), |
| | HSCREACT_PEA_1_T29 (SEQ ID |
| | NO: 255), HSCREACT_PEA_1_T30 |
| | (SEQ ID NO: 256), |
| | HSCREACT_PEA_1_T32 (SEQ ID |
| | NO: 257) and HSCREACT_PEA_1_T33 |
| | (SEQ ID NO: 258) |
| HSCREACT_PEA_1_node_54 (SEQ ID NO: 307) | HSCREACT_PEA_1_T12 (SEQ ID |
| | NO: 251), HSCREACT_PEA_1_T13 |
| | (SEQ ID NO: 252), |
| | HSCREACT_PEA_1_T15 (SEQ ID |
| | NO: 253), HSCREACT_PEA_1_T22 |
| | (SEQ ID NO: 254), |
| | HSCREACT_PEA_1_T29 (SEQ ID |
| | NO: 255), HSCREACT_PEA_1_T30 |
| | (SEQ ID NO: 256), |
| | HSCREACT_PEA_1_T32 (SEQ ID |
| | NO: 257) and HSCREACT_PEA_1_T33 |
| | (SEQ ID NO: 258) |
| HSCREACT_PEA_1_node_55 (SEQ ID NO: 308) | HSCREACT_PEA_1_T12 (SEQ ID |
| | NO: 251), HSCREACT_PEA_1_T13 |
| | (SEQ ID NO: 252), |
| | HSCREACT_PEA_1_T15 (SEQ ID |
| | NO: 253), HSCREACT_PEA_1_T22 |
| | (SEQ ID NO: 254), |
| | HSCREACT_PEA_1_T29 (SEQ ID |
| | NO: 255), HSCREACT_PEA_1_T30 |
| | (SEQ ID NO: 256), |
| | HSCREACT_PEA_1_T32 (SEQ ID |
| | NO: 257) and HSCREACT_PEA_1_T33 |
| | (SEQ ID NO: 258) |
| HSCREACT_PEA_1_node_56 (SEQ ID NO: 309) | HSCREACT_PEA_1_T12 (SEQ ID |
| | NO: 251), HSCREACT_PEA_1_T13 |
| | (SEQ ID NO: 252), |
| | HSCREACT_PEA_1_T15 (SEQ ID |
| | NO: 253), HSCREACT_PEA_1_T22 |
| | (SEQ ID NO: 254), |
| | HSCREACT_PEA_1_T29 (SEQ ID |
| | NO: 255), HSCREACT_PEA_1_T30 |
| | (SEQ ID NO: 256), |
| | HSCREACT_PEA_1_T32 (SEQ ID |
| | NO: 257) and HSCREACT_PEA_1_T33 |
| | (SEQ ID NO: 258) |
| HSCREACT_PEA_1_node_57 (SEQ ID NO: 310) | HSCREACT_PEA_1_T12 (SEQ ID |
| | NO: 251), HSCREACT_PEA_1_T13 |
| | (SEQ ID NO: 252), |
| | HSCREACT_PEA_1_T15 (SEQ ID |
| | NO: 253), HSCREACT_PEA_1_T22 |
| | (SEQ ID NO: 254), |
| | HSCREACT_PEA_1_T29 (SEQ ID |
| | NO: 255), HSCREACT_PEA_1_T30 |
| | (SEQ ID NO: 256), |
| | HSCREACT_PEA_1_T32 (SEQ ID |
| | NO: 257) and HSCREACT_PEA_1_T33 |
| | (SEQ ID NO: 258) |
| HSCREACT_PEA_1_node_58 (SEQ ID NO: 311) | HSCREACT_PEA_1_T12 (SEQ ID |
| | NO: 251), HSCREACT_PEA_1_T13 |
| | (SEQ ID NO: 252), |
| | HSCREACT_PEA_1_T15 (SEQ ID |
| | NO: 253), HSCREACT_PEA_1_T22 |
| | (SEQ ID NO: 254), |
| | HSCREACT_PEA_1_T29 (SEQ ID |
| | NO: 255), HSCREACT_PEA_1_T30 |
| | (SEQ ID NO: 256), |
| | HSCREACT_PEA_1_T32 (SEQ ID |
| | NO: 257), HSCREACT_PEA_1_T33 |
| | (SEQ ID NO: 258) and |
| | HSCREACT_PEA_1_T39 (SEQ ID |
| | NO: 260) |
| HSCREACT_PEA_1_node_59 (SEQ ID NO: 312) | HSCREACT_PEA_1_T12 (SEQ ID |
| | NO: 251), HSCREACT_PEA_1_T13 |
| | (SEQ ID NO: 252), |
| | HSCREACT_PEA_1_T15 (SEQ ID |
| | NO: 253), HSCREACT_PEA_1_T22 |
| | (SEQ ID NO: 254), |
| | HSCREACT_PEA_1_T29 (SEQ ID |
| | NO: 255), HSCREACT_PEA_1_T30 |
| | (SEQ ID NO: 256), |
| | HSCREACT_PEA_1_T32 (SEQ ID |
| | NO: 257), HSCREACT_PEA_1_T33 |
| | (SEQ ID NO: 258), |
| | HSCREACT_PEA_1_T38 (SEQ ID |
| | NO: 259) and HSCREACT_PEA_1_T39 |
| | (SEQ ID NO: 260) |
| HSCREACT_PEA_1_node_60 (SEQ ID NO: 313) | HSCREACT_PEA_1_T12 (SEQ ID |
| | NO: 251), HSCREACT_PEA_1_T13 |
| | (SEQ ID NO: 252), |
| | HSCREACT_PEA_1_T15 (SEQ ID |
| | NO: 253), HSCREACT_PEA_1_T22 |
| | (SEQ ID NO: 254), |
| | HSCREACT_PEA_1_T29 (SEQ ID |
| | NO: 255), HSCREACT_PEA_1_T30 |
| | (SEQ ID NO: 256), |
| | HSCREACT_PEA_1_T32 (SEQ ID |
| | NO: 257), HSCREACT_PEA_1_T33 |
| | (SEQ ID NO: 258), |
| | HSCREACT_PEA_1_T38 (SEQ ID |
| | NO: 259) and HSCREACT_PEA_1_T39 |
| | (SEQ ID NO: 260) |
| HSCREACT_PEA_1_node_61 (SEQ ID NO: 314) | HSCREACT_PEA_1_T12 (SEQ ID |
| | NO: 251), HSCREACT_PEA_1_T13 |
| | (SEQ ID NO: 252), |
| | HSCREACT_PEA_1_T15 (SEQ ID |
| | NO: 253), HSCREACT_PEA_1_T22 |
| | (SEQ ID NO: 254), |
| | HSCREACT_PEA_1_T29 (SEQ ID |
| | NO: 255), HSCREACT_PEA_1_T30 |
| | (SEQ ID NO: 256), |
| | HSCREACT_PEA_1_T32 (SEQ ID |
| | NO: 257), HSCREACT_PEA_1_T33 |
| | (SEQ ID NO: 258), |
| | HSCREACT_PEA_1_T38 (SEQ ID |
| | NO: 259) and HSCREACT_PEA_1_T39 |
| | (SEQ ID NO: 260) |
| HSCREACT_PEA_1_node_64 (SEQ ID NO: 315) | HSCREACT_PEA_1_T12 (SEQ ID |
| | NO: 251), HSCREACT_PEA_1_T13 |
| | (SEQ ID NO: 252), |
| | HSCREACT_PEA_1_T15 (SEQ ID |
| | NO: 253), HSCREACT_PEA_1_T22 |
| | (SEQ ID NO: 254), |
| | HSCREACT_PEA_1_T29 (SEQ ID |
| | NO: 255), HSCREACT_PEA_1_T30 |
| | (SEQ ID NO: 256), |
| | HSCREACT_PEA_1_T32 (SEQ ID |
| | NO: 257), HSCREACT_PEA_1_T33 |
| | (SEQ ID NO: 258), |
| | HSCREACT_PEA_1_T38 (SEQ ID |
| | NO: 259) and HSCREACT_PEA_1_T39 |
| | (SEQ ID NO: 260) |

TABLE 96
Proteins of interest

| Protein Name | Corresponding Transcript(s) |
|---|---|
| HSCREACT_PEA_1_P9 (SEQ ID NO: 317) | HSCREACT_PEA_1_T12 (SEQ ID NO: 251); |
| | HSCREACT_PEA_1_T32 (SEQ ID NO: 257); |
| | HSCREACT_PEA_1_T39 (SEQ ID NO: 260) |
| HSCREACT_PEA_1_P10 (SEQ ID NO: 318) | HSCREACT_PEA_1_T13 (SEQ ID NO: 252) |
| HSCREACT_PEA_1_P12 (SEQ ID NO: 319) | HSCREACT_PEA_1_T15 (SEQ ID NO: 253); |
| | HSCREACT_PEA_1_T30 (SEQ ID NO: 256); |
| | HSCREACT_PEA_1_T38 (SEQ ID NO: 259) |
| HSCREACT_PEA_1_P16 (SEQ ID NO: 320) | HSCREACT_PEA_1_T22 (SEQ ID NO: 254) |
| HSCREACT_PEA_1_P22 (SEQ ID NO: 321) | HSCREACT_PEA_1_T29 (SEQ ID NO: 255) |
| HSCREACT_PEA_1_P28 (SEQ ID NO: 322) | HSCREACT_PEA_1_T33 (SEQ ID NO: 258) |

[1257] These sequences are variants of the known protein C-reactive protein precursor (SEQ ID NO:316) (SwissProt accession identifier CRP_HUMAN (SEQ ID NO:316)), referred to herein as the previously known protein.

[1258] Protein C-reactive protein precursor (SEQ ID NO:316) is known or believed to have the following function(s): Displays several functions associated with host defense: it promotes agglutination, bacterial capsular swelling, phagocytosi and complement fixation through its calcium-dependent binding to phosphorylcholine. Can interact with DNA and histones and may scavenge nuclear material released from damaged circulating cells. Known polymorphisms for this sequence are as shown in Table 97.

TABLE 97
Amino acid mutations for Known Protein

| SNP position(s) on amino | |
|---|---|
| acid sequence | Comment |
| 49 | K -> G |
| 52 | T -> G |
| 67-82 | YSIFSYATKRQDNEIL -> |
| | TVFSRMPPRDKTMRFF |
| 80-98 | Missing |
| 170 | L -> V |

[1259] Protein C-reactive protein precursor (SEQ ID NO:316) localization is believed to be Secreted.

[1260] The previously known protein also has the following indication(s) and/or potential therapeutic use(s): Infarction, myocardial; Surgery adjunct; Coronary artery bypass grafting; Systemic inflammatory response syndrome. It has been investigated for clinical/therapeutic use in humans, for example as a target for an antibody or small molecule, and/or as a direct therapeutic; available information related to these investigations is as follows. Potential pharmaceutically related or therapeutically related activity or activities of the previously known protein are as follows: Polymorphonuclear neutrophil inhibitor. A therapeutic role for a protein represented by the cluster has been predicted. The cluster was assigned this field because there was information in the drug database or the public databases (e.g., described herein above) that this protein, or part thereof, is used or can be used for a potential therapeutic indication: Septic shock treatment; Cardiovascular.

[1261] The following GO Annotation(s) apply to the previously known protein. The following annotation(s) were found: acute-phase response; inflammatory response, which are annotation(s) related to Biological Process; ligand binding or carrier, which are annotation(s) related to Molecular Function; and extracellular space, which are annotation(s) related to Cellular Component.

[1262] The GO assignment relies on information from one or more of the SwissProt/TremBl Protein knowledgebase, available from <http://www.expasy.ch/sprot/>; or Locuslink, available from <http://www.ncbi.nlm.nih.gov/projects/LocusLink/>.

[1263] According to optional but preferred embodiments of the present invention, variants of this cluster according to the present invention (amino acid and/or nucleic acid sequences of HSCREACT may optionally have one or more of the following utilities, as described with regard to Table 98 below. It should be noted that these utilities are optionally and preferably suitable for human and non-human animals as subjects, except where otherwise noted. The reasoning is described with regard to biological and/or physiological and/or other information about the known protein, but is given to demonstrate particular diagnostic utility for the variants according to the present invention.

TABLE 98
Utilities for Variants of HSCREACT, related to C-reactive protein precursor (SEQ ID
NO: 316) isoform: CRP_HUMAN (SEQ ID NO: 316)

| Utility | Reason | Reference |
|---|---|---|
| A risk factor for atherosclerosis | elevated CRP concentration | Vnitr Lek. 2004 |
| progression and its complications | | Nov; 50(11): 852-7. |
| (myocardial infarction and stroke) | | |
| prognostic marker in acute coronary | elevated CRP concentration | Am Heart Hosp J. 2004 |
| syndromes, following angioplasty, and | | Fall; 2(4 Suppl 1): 4-9. |
| in the long-term management of post- | | |
| infarction patients. | | |
| myocardial infarction risk factor | elevated CRP concentration | J Cardiovasc Nurs. 2004 Nov-Dec; |
| | | 19(6): 425-9. |
| nonlipid cardiovascular event risk | elevated CRP concentration | J Cardiovasc Nurs. 2004 Nov-Dec; |
| marker | | 19(6): 425-9. |
| plasma level of CRP is considered to | elevated plasma level of CRP | Curr Opin Lipidol. 2004 |
| reflect the inflammatory condition of | | Dec; 15(6): 651-7. |
| the patient and/or the vessel wall | | |
| a marker for inflammatory bowel | serum levels of CRP correlate | Inflamm Bowel Dis. 2004 |
| disease. | well with disease activity and | Sep; 10(5): 661-5. |
| | with other markers of | |
| | inflammation as the CDAI, | |
| | serum amyloid, IL-6 and faecal | |
| | calprotectin. | |
| a valuable marker to detect and follow | serum levels of CRP correlate | Inflamm Bowel Dis. 2004 |
| up disease activity in Crohn's disease | well with disease activity and | Sep; 10(5): 661-5. |
| (CD). | with other markers of | |
| | inflammation as the CDAI, | |
| | serum amyloid, IL-6 and faecal | |
| | calprotectin. | |
| active mediator in the pathogenesis of | macrophage recruitment, and | Am J Med. 2004 Oct |
| atherosclerosis. | foam cell generation | 1; 117(7): 499-507. |
| Serum procalcitonin and C-reactive | elevated plasma level of CRP | Clin Infect Dis. 2004 Jul |
| protein levels as markers of bacterial | | 15; 39(2): 206-17. Epub 2004 |
| infection | | Jul 02. |
| a marker to identify women at risk for | elevated CRP concentration | J Fam Pract. 2004 |
| heart disease After menopause. | | Jul; Suppl: S18-24. |
| prediction of type 2 diabetes. | elevated CRP concentration | Circulation. 2004 Jun |
| | | 15; 109(23): 2818-25. |
| ischemic heart disease in peritoneal | elevated CRP concentration | Nephrology (Carlton). 2003 |
| dialysis (PD) patients. | | Oct; 8 Suppl: S40-4. |
| Anti-myeloperoxidase (anti-MPO) | C-reactive protein and anti- | Ren Fail. 2003 |
| associated vasculitis | MPO titer, have substantial | Nov; 25(6): 1057-66. |
| | values in monitoring disease | |
| | activity | |
| diagnosis of sepsis in full-term or near- | elevated hsCRP concentration | Adv Neonatal Care. 2003 |
| term infants. | | Feb; 3(1): 3-13. |
| surrogate endpoint in cardiovascular | Various cardiovascular drugs, | Vascul Pharmacol. 2002 |
| disease treatments. | notably statins, can induce a | Aug; 39(3): 99-104. |
| | marked decrease in low levels | |
| | of CRP | |
| cardiac hypertrophy | elevated CRP concentration | Am J Kidney Dis. 2002 |
| | | Dec; 40(6): 1340-1. |
| a marker for all-cause and | elevated CRP concentration | Nephrol Dial Transplant. |
| cardiovascular mortality in | | 2002; 17 Suppl 8: 29-32; |
| haemodialysis patients. | | discussion 39-40. |
| a prognostic indicator in advanced | a predictor of survival has been | Curr Oncol Rep. 2002 |
| cancer. | shown in multiple myeloma, | May; 4(3): 250-5. |
| | melanoma, lymphoma, ovarian, | |
| | renal, pancreatic, and | |
| | gastrointestinal tumors. | |
| secondary prevention of coronary | elevated CRP concentration | Clin Chim Acta. 2001 Sep |
| events. | | 15; 311(1): 49-52. |
| primary prevention of ischemic heart | elevated CRP concentration | Clin Chim Acta. 2001 Sep |
| disease. | | 15; 311(1): 45-8. |
| a marker of chronic inflammation in | elevated CRP concentration | Blood Purif. 2000; 18(3): 183-90. |
| uremic patients. | | |
| marker of risk of restenosis | elevated CRP concentration | Semin Interv Cardiol. 1999 |
| | | Sep; 4(3): 105-10. |
| monitor IL-2 cancer immunotherapy | abnormally high pretreatment | J Biol Regul Homeost Agents. |
| | values of inflammatory | 1999 Apr-Jun; 13(2): 110-4. |
| | response markers, including | |
| | ESR, CRP, neopterin and SIL- | |
| | 2R, may predict a lack of IL-2 | |
| | efficacy | |
| cardiovascular disease risk. | elevated CRP levels (as | Cleve Clin J Med. 2003 |
| | measured by highly sensitive | Jul; 70(7): 634-40. |
| | assays) are associated with | |
| | increased cardiovascular risk. | |
| | Of patients at intermediate risk | |
| | and at high risk | |
| human breast cancer | Secondary marker combined | In Vivo. 1993 Nov-Dec; |
| | with CEA | 7(6B): 607-13. |
| predict the prognosis, to monitor the | non-specific tumor markers | Nippon Rinsho. 1996 |
| effects of the treatment, to detect | such as LDH, ESR, CRP and | Jun; 54(6): 1621-5. |
| minimum residual disease and to | beta 2-MG are generally used | |
| diagnose early relapse in patients' with | | |
| peripheral blood with | | |
| lymphoproliferative disorders, | | |
| especially malignant lymphomas. | | |
| Predictors of joint damage in | Unspecific markers of | APMIS. 1996 Feb; 104(2): 81-93. |
| rheumatoid arthritis. | inflammation, notably ESR or | |
| | CRP when persistently | |
| | elevated, are useful to monitor | |
| | disease course | |
| rheumatoid arthritis. | C-reactive protein (CRP) is a | Cell Mol Biol (Noisy-le- |
| | sensitive marker, and is used to | grand). 1995 Dec; 41(8): 993-1006. |
| | monitor inflammatory and | |
| | infectious diseases. In | |
| | rheumatoid arthritis (RA), CRP | |
| | correlates with disease activity | |
| | and response to therapy, and | |
| | CRP levels are influenced by | |
| | disease-modifying drugs and | |
| | corticosteroids. | |
| C-reactive protein: a biomarker of | CRP (p = 0.002) and DFI (p = | J Urol. 2005 Jan; 173(1): 52-5. |
| survival in patients with metastatic | 0.0497) were found to have an | |
| renal cell carcinoma treated with | independent role in survival. | |
| subcutaneous interleukin-2 based | When we correlated clinical | |
| immunotherapy. | and biohumoral factors, only | |
| | CRP correlated with DFI (p = | |
| | 0.021) and prior nephrectomy | |
| | (p = 0.041). | |
| Diagnosing melanoma patients entering | CRP yielded a sensitivity of | Br J Cancer. 2004 Aug |
| American Joint Committee on Cancer | 0.769 together with a | 16; 91(4): 699-702. |
| stage IV, C-reactive protein in serum is | specificity of 0.904 in | |
| superior to lactate dehydrogenase. | diagnosing AJCC stage IV | |
| | entry. | |
| Increased C-reactive protein levels in | elevated CRP concentration | J Clin Endocrinol Metab. 2004 |
| the polycystic ovary syndrome: a | | May; 89(5): 2160-5. |
| marker of cardiovascular disease. | | |
| type 2 diabetes | Elevated CRP levels are a | Diabetes. 2004 |
| | strong independent predictor of | Mar; 53(3): 693-700. |
| | type 2 diabetes and may | |
| | mediate associations of TNF- | |
| | alphaR2 and IL-6 with type 2 | |
| | diabetes. | |
| esophageal squamous cell carcinoma. | A high CRP level is associated | J Surg Oncol. 2003 |
| | with tumor progression and | Aug; 83(4): 248-52. |
| | poor survival in patients with | |
| | esophageal squamous cell | |
| | carcinoma. | |
| CRP holds promise as a diagnostic and | CRP levels were correlated | Med Pediatr Oncol. 2003 |
| prognostic index and follow-up monitor | with stage, absence or presence | Jul; 41(1): 21-5. |
| in pediatric and adolescent patients with | of B symptoms, and prognosis | |
| Hodgkin disease | | |
| microalbuminuria in patients with non- | a high frequency of | Br J Haematol. 2003 |
| Hodgkin's lymphoma | microalbuminuria (>or=20 microg/min) | Apr; 121 (2): 275-9. |
| | and UAE | |
| | correlated strongly with serum | |
| | levels of CRP, IL-6 and TNF- | |
| | alpha. UAE, CRP, IL-6 and | |
| | TNF-alpha were significantly | |
| | higher in patients with | |
| | advanced disease stage, B | |
| | symptoms and in high-risk | |
| | patients according to the | |
| | International Prognostic Index. | |
| lung cancer | CYFRA 21-1, NSE, and CRP | Int J Clin Oncol. 2002 |
| | yielded an increase in | Jun; 7(3): 145-51. |
| | sensitivity of approximately | |
| | 20%, i.e., 92%, compared with | |
| | that of the best single marker | |
| Correlation between the uptake of Tc- | a positive correlation between | Clin Lab Haematol. 2002 |
| 99m-sestaMIBI and prognostic factors | Tc-99m-MIBI intensity and C- | Jun; 24(3): 155-9. |
| in patients with multiple myeloma. | reactive protein (CRP; r = 0.506, | |
| | P < 0.01), erythrocyte | |
| | sedimentation rate (ESR; | |
| | r = 0.368, P < 0.05), beta2- | |
| | microglobulin (beta2M; | |
| | r = 0.749, P < 0.001), | |
| | interleukin-6 (IL-6; r = 0.823, P < 0.001), | |
| | soluble Interleukin-6 | |
| | receptor (sIL-6r; r = 0.806, P < | |
| | 0.001), serum calcium | |
| | (r = 0.578, P < 0.001) and bone | |
| | alkaline phosphatase (BAP; | |
| | r = 0.472, P < 0.01). | |
| malignant fibrous histiocytoma | Patients with MFH frequently | Int J Cancer. 2002 May |
| | present with an inflammatory | 10; 99(2): 167-70. |
| | PNS, such as elevated serum | |
| | CRP level, which can be a | |
| | useful marker of disease | |
| | activity and a valuable | |
| | prognostic indicator. | |
| IL-6 especially in the combination with | The levels of IL-6, CRP and | Pol Merkuriusz Lek. 2001 |
| CRP and TPS may be useful in the | TPS were decreased above cut | Sep; 11(63): 210-3. |
| diagnosis and the evaluation of therapy | off values in patients with | |
| of patients with ovarian carcinoma | remission, and did not changed | |
| | in patients with progression and | |
| | stabilization disease | |
| Not traditional prognostic factors in | C-reactive protein, ferritin and | Minerva Urol Nefrol. 2001 |
| human conventional renal carcinoma | the proliferative activity | Dec; 53(4): 211-9. |
| | indexes (Ki67 and AgNOR) | |
| | appear to be, at present, the best | |
| | prognostic tools. | |
| type 2 diabetes mellitus | Elevated levels of CRP and IL- | JAMA. 2001 Nov |
| | 6 predict the development of | 14; 286(18): 2233. |
| | type 2 DM | |
| hepatocellular carcinoma in patients | very high values of CRP in | J Gastroenterol Hepatol. 2000 |
| with cirrhosis | patients with cirrhosis may | Apr; 15(4): 417-21. |
| | suggest the presence of a | |
| | diffuse-type HCC. | |
| tubo-ovarian complex (TOC). | Determination of CRP, and | Int J Gynaecol Obstet. 1999 |
| | somewhat less ESR, is more | Mar; 64(3): 273-9. |
| | suitable for following the | |
| | treatment of TOC in the acute | |
| | phase while CA-125 and | |
| | measuring of TOC size is more | |
| | suitable in the subacute phase. | |
| C-reactive protein serum level is a | there is a significant | Leuk Lymphoma. 1998 |
| valuable and simple prognostic marker | relationship between CRP and | Oct; 31(3-4): 351-7 |
| in non Hodgkin's lymphoma | IL-6 levels (p < 0.00017), and | |
| | CRP levels and B symptoms | |
| | (p < 0.001). | |
| indicator for prognosis in colorectal | A preoperative serum elevation | Am J Surg. 1998 |
| cancer. | of CRP was thus found to be an | Oct; 176(4): 335-8. |
| | indicator of the malignant | |
| | potential of the tumor as well as | |
| | a predictor of the prognosis of | |
| | patients with colorectal cancer. | |
| advanced epithelial ovarian cancer. | high IL-6 and/or CRP serum | Gynecol Oncol. 1998 |
| | levels may represent an | Jun; 69(3): 248-52. |
| | important and independent | |
| | prognostic factor of the likely | |
| | outcome in cancer patients. | |
| heterotopic ossification after spinal cord | erum CRP is a useful and more | J Spinal Cord Med. |
| injury. | specific test than is ESR for | 2004; 27(5): 434-7. |
| | monitoring the inflammatory | |
| | activity of HO after SCI. The | |
| | normalization of CRP was seen | |
| | during the first 3 to 4 weeks of | |
| | etidronate therapy, indicating a | |
| | resolution of acute-phase | |
| | inflammatory reaction. | |
| Autoimmune pancreatitis with | The serum amylase, C-reactive | J Gastroenterol. 2004 |
| pseudocysts | protein (CRP), and IgG | Oct; 39(10): 1005-10. |
| | (especially IgG4) were | |
| | elevated, and abdominal | |
| | computed tomography (CT) | |
| | revealed diffuse enlargement of | |
| | the pancreas and pseudocysts. | |
| a prognostic role for C-reactive protein | The response of SAA, CRP and | Scand J Gastroenterol. 2004 |
| and hepatocyte growth factor after | IGF-I was lower in PH patients | Nov; 39(11): 1141-8. |
| laparotomy or partial hepatectomy in | than in laparotomy patients, A | |
| patients with colorectal liver metastases | higher HGF and CRP response | |
| | was associated with a poorer | |
| | prognosis. | |
| coronary artery ectasia (CAE) | Elevated CRP levels | Am J Cardiol. 2004 Nov |
| | | 15; 94(10): 1303-6. |
| diagnostic value of C-reactive protein, | Evaluation of the clinical | Saudi Med J. 2004 |
| white blood cell count and neutrophil | symptoms and signs combined | Sep; 25(9): 1212-5. |
| percentage in childhood appendicitis. | with the triple tests can improve | J Med Assoc Thai. 2004 |
| | the diagnostic accuracy and | Mar; 87(3): 296-303. |
| | significantly reduce the | |
| | incidence of perforation and the | |
| | rate of negative laparotomy. | |
| C-reactive protein as a predictor of | | Neuro Endocrinol Lett. 2004 |
| threatening preterm delivery. | | Aug; 25(4): 302-6. |
| C-reactive protein as a prognostic | Increased serum CRP was | Dig Dis Sci. 2004 |
| variable that reflects uncontrolled up- | associated with recurrent | Jun; 49(6): 970-6. |
| regulation of the IL-1-IL-6 network | disease and shorter survival | |
| system in colorectal carcinoma. | time | |
| -reactive protein levels and the | CRP levels are elevated in | Circulation. 2004 Aug |
| expansion of screen-detected abdominal | larger aneurysms but do not | 17; 110(7): 862-6. Epub 2004 |
| aortic aneurysms in men. | appear to be associated with | Aug 09. |
| | rapid expansion. The most | |
| | useful predictor of aneurysmal | |
| | expansion in men is aortic | |
| | diameter. | |
| The predictive and diagnostic values of | PCT and CRP are comparable | J Chin Med Assoc. 2004 |
| procalcitonin and C-reactive protein for | with each other in prediction of | May; 67(5): 217-21. |
| clinical outcome in febrile neutropenic | the clinical severity of febrile | |
| patients. | neutropenic attacks. | |
| | Furthermore, serum CRP levels | |
| | correlate with the duration of | |
| | fever. | |
| C-reactive protein as an indicator of | Daily measurement of CRP is | Intensive Care Med. 1998 |
| sepsis. | useful in the detection of sepsis | Oct; 24(10): 1052-6. |
| | and it is more sensitive than the | |
| | currently used markers, such as | |
| | BT and WBC. | |
| CRP as en early and preclinical marker | difference of CRP | Ginekol Pol. 1997 |
| of postsurgery inflammation process. | concentration was detected in | Jan; 68(1): 36-40. |
| | 24th hour after operation | |
| prediction of severity of acute | The serum concentration of IL- | J Chin Med Assoc. 2004 |
| pancreatitis | 6 on the first day and/or the | Sep; 67(9): 442-6. |
| | serum concentration of CRP on | Gastroenterol Clin North Am. |
| | the 2nd day of admission are | 2004 Dec; 33(4): 871-90. |
| | useful for early prediction of | |
| | the severity of acute | |
| | pancreatitis. | |
| Severe acute pancreatitis (SAP) and | CRP levels differed | Clin Chem Lab Med. 2004 |
| mild acute pancreatitis (MAP) | significantly on days 2-5 | May; 42(5): 549-55. |
| Behcet's disease and risk of venous | protein S, AT, alpha(1)- | Br J Haematol. 2004 |
| thrombosis | antitrypsin, fibrinogen, factor | Aug; 126(4): 550-6. |
| | VIII, VWF and CRP levels | J Eur Acad Dermatol |
| | were significantly higher in | Venereol. 2004 |
| | patients than in controls | May; 18(3): 318-20. |
| | serum CRP and IL-6 levels are | |
| | elevated in patients with active | |
| | BD | |
| ankylosing spondylitis | data suggest that CRP is a | South Med J. 2004 |
| | better marker of disease activity | Apr; 97(4): 350-3. |
| | than ESR, Hp, and beta2MG. | |
| C-reactive protein as a predictor of | | Arthritis Rheum. 2005 |
| infliximab treatment outcome in | | Jan; 52(1): 42-8. |
| patients with rheumatoid arthritis: | | |
| defining subtypes of nonresponse and | | |
| subsequent response to etanercept. | | |
| Does the type of hormone replacement | The 2 forms of HRT therapy | |
| therapy affect C-reactive protein levels | differ in effect, which is | |
| in postmenopausal women | expressed as a change in CRP | |
| | concentration. A tendency to | |
| | increase CRP values when | |
| | using oral HRT is observed, | |
| | while such an effect is not | |
| | observed in case of transdermal | |
| | therapy after 3 months. | |
| joint inflammatory activity in RA | ultrasonography findings | Ann Rheum Dis. 2005 |
| | correlated better with CRP and | Mar; 64(3): 375-81. |
| | ESR to compare the clinical | |
| | assessment of overall | |
| | inflammatory activity in | |
| | patients with rheumatoid | |
| | arthritis (RA) | |
| diabetes in infants and young adults | Levels of hs CRP were 3-fold | Presse Med. 2005 Jan 29; 34(2 |
| | greater in diabetic patients | Pt 1): 89-93. |
| | without complications than in | |
| | controls and 5-fold greater in | |
| | diabetic patients with | |
| | subclinical complications. High | |
| | sensitive CRP therefore appears | |
| | to be an interesting indicator of | |
| | the risk for developing | |
| | complications. | |
| Cardiovascular risk factors in women | levels of several inflammatory | Arthritis Rheum. 2004 |
| with and without rheumatoid arthritis. | biomarkers linked to CVD were | Nov; 50(11): 3444-9. |
| | significantly elevated in women | |
| | with RA, including CRP | |
| mumps orchitis | CRP titers in mumps patients | Pediatr Infect Dis J. 2004 |
| | with orchitis and meningitis. | Oct; 23(10): 971. |
| | The serum CRP titers were | |
| | significantly higher in the | |
| | patients with orchitis than in | |
| | those with meningitis. | |
| severe closed trauma | The course of serum CRP | Enferm Infecc Microbiol Clin. |
| | levels is different in the group | 2001 Feb; 19(2): 61-5. |
| | of patients with severe blunt | |
| | trauma and infection, compared | |
| | with the non-infected group | |
| | during the first week after | |
| | injury and it could be an useful | |
| | supplementary marker for | |
| | infection after postinjury day 4. | |
| | A value of 110 mg/l or higher | |
| | for CRP should suggest an | |
| | underlying infectious | |
| | complication. | |
| Pneumonia | Serum CRP level is a useful | Chest. 2004 Apr; 125(4): 1335-42. |
| | marker for establishing the | |
| | diagnosis of CAP in adult | |
| | patients with lower respiratory | |
| | tract infections. High CRP | |
| | values are especially high in | |
| | patients with pneumonias | |
| | caused by S pneumoniae or L | |
| | pneumophila. Moreover, high | |
| | CRP values are suggestive of | |
| | severity, which may be of value | |
| | in deciding about the | |
| | appropriateness of inpatient | |
| | care. | |
| outcomes after statin therapy | Patients who have low CRP | N Engl J Med. 2005 Jan |
| | levels after statin therapy have | 6; 352(1): 20-8. |
| | better clinical outcomes than | |
| | those with higher CRP levels, | |
| | regardless of the resultant level | |
| | of LDL cholesterol. Strategies | |
| | to lower cardiovascular risk | |
| | with statins should include | |
| | monitoring CRP as well as | |
| | cholesterol. | |
| Sinusitis | The CRP rapid test has a | Br J Gen Pract. 2004 |
| | substantial influence on the | Sep; 54(506): 659-62. |
| | treatment of sinusitis, and | |
| | implementing the test in | |
| | general practice may lead to a | |
| | reduction in antibiotic | |
| | prescribing to patients with | |
| | sinusitis | |
| Post transplant diabetes mellitus and | high serum levels of CRP and | Transplantation. 2005 Feb |
| atherosclerotic events in renal | hyperhomocystinemia were | 27; 79(4): 438-43. |
| transplant recipients | found to be among the | |
| | nontraditional factors | |
| | contributing to AE | |
| Factors predisposing to pre-eclampsia | GDM-PE had elevated body | J Hypertens. 2004 |
| in women with gestational diabetes | mass index, blood pressure, | Dec; 22(12): 2371-8. |
| | fasting glucose, insulin, uric | |
| | acid, and G-reactive protein | |
| | (CRP), which have all been | |
| | linked with the ‘metabolic | |
| | syndrome’. They had a greater | |
| | degree of microalbuminuria and | |
| | more frequently reported a | |
| | family history of hypertension | |
| | and maternal gestational | |
| | diabetes. | |
| Baseline predictors of vascular events | Antiphospholipid antibodies | |
| in Systemic lupus erythematosus | and CRP support the role of | |
| | inflammation and | |
| | autoimmunity in the | |
| | development of accelerated | |
| | atherosclerosis in SLE. | |
| Atherosclerosis | A high plasma level of high- | J Atheroscler Thromb. |
| | sensitivity C-reactive protein | 2004; 11(5): 265-70. |
| | (hs-CRP) is an important | |
| | predictor of atherosclerotic | |
| | diseases. | |
| hospital-acquired severe acute | elevated levels of LDH and | Mayo Clin Proc. 2004 |
| respiratory syndrome. | CRP correlated with severe | Nov; 79(11): 1372-9. |
| | illness requiring mechanical | |
| | ventilatory support. | |
| atrial fibrillation | high levels of CRP | Am J Cardiol. 2004 Nov |
| | independently predicted an | 15; 94(10): 1255-9. |
| | increased risk of AF among a | |
| | large, prospectively studied | |
| | patient cohort that was assessed | |
| | angiographically. Increased | |
| | CRP is a new risk marker for | |
| | AF propensity, | |
| acute pancreatitis with a significant | A favourable turn in the course | Rozhl Chir. 2004 |
| multiorgan dysfunction | of the disease was signalized by | Sep; 83(9): 443-50. |
| | a drop in the serum CRP and by | |
| | a decreasing need for | |
| | vasopressors medication. | |
| acute pancreatitis | Elevated CRP levels above 130 mg/L | Gastroenterol Clin North Am. |
| | can also predict a severe | 2004 Dec; 33(4): 855-69, viii. |
| | course of acute pancreatitis | |
| bacterial peritonitis, and malignant and | The sensitivity and specificity | J Natl Med Assoc. 2005 |
| cirrhotic ascites. | of ascitic fluid CRP, TNF-alpha | Feb; 97(2): 276-80. |
| | and TNF-r values were found to | |
| | be similar. Ascitic fluid | |
| | Creactive protein to | |
| | differentiate SBP and malignant | |
| | ascitic from cirrhotic ascites are | |
| | cheap, practical and safe tests | |
| | used in the differential | |
| | diagnosis of ascites. | |
| Procalcitonin, C-reactive protein, and | serum CRP and endotoxin, | Bone Marrow Transplant. |
| endotoxin after bone marrow | correlated with the severity of | 2003 Jun; 31(12): 1137-42. |
| transplantation: identification of | sepsis (8.2 ng/ml in ‘sepsis’ and | |
| children at high risk of morbidity and | 22.3 ng/ml in ‘severe sepsis’, | |
| mortality from sepsis. | P = 0.028) and provided useful | |
| | prognostic information during | |
| | septic episodes. | |
| Pharyngitis | The CRP test seems to be a | Scand J Clin Lab Invest. |
| | valid test for monitoring the | 2002; 62(7): 521-5. |
| | clinical course in GAS | |
| | pharyngitis. | |
| paroxysmal atrial fibrillation | longer AF duration is | Heart Vessels. 2005 |
| | associated with CRP elevation | Mar; 20(2): 45-9. |
| | and atrial structural remodeling, | |
| | as approximated by larger LA | |
| | diameter. | |
| Progression of native coronary plaques | increased pre-procedural C | Heart. 2005 Apr; 91(4): 535-6. |
| and in-stent restenosis | reactive protein. | |
| predicts outcome in patients undergoing | in patients who have undergone | Br J Cancer. 2005 Jan |
| resection for ductal adenocarcinoma | potentially curative resection | 17; 92(1): 21-3. |
| head of pancreas. | for ductal adenocarcinoma of | |
| | the head of pancreas, the | |
| | presence of a systemic | |
| | inflammatory response (CRP) | |
| | predicts poor outcome. | |
| risk of colorectal cancer | C-reactive protein elevation | Gastroenterol Nurs. 2004 Sep-Oct; |
| | | 27(5): 246-7. |
| non-small-cell lung cancer | C-reactive protein, interleukin- | Br J Cancer. 2004 Dec |
| | 6, soluble gp130, soluble TNF | 13; 91(12): 1993-5. |
| | receptor, interleukin-1 receptor | |
| | antagonist and IL-8 | |
| | concentrations were | |
| | significantly elevated in cancer | |
| | patients (P < or = 0.001). Cancer | |
| | patients with elevated C- | |
| | reactive protein concentrations | |
| | had greater concentrations of | |
| | interleukin-6 (P < 0.01) and | |
| | interleukin-1 receptor | |
| | antagonist (P < 0.05). | |
| colon cancer | Plasma CRP concentrations are | JAMA. 2004 Feb |
| | elevated among persons who | 4; 291(5): 585-90. |
| | subsequently develop colon | |
| | cancer. These data support the | |
| | hypothesis that inflammation is | |
| | a risk factor for the | |
| | development of colon cancer in | |
| | average-risk individuals. | |
| breast tumors | The concentrations of IL-6 and | Pol Merkuriusz Lek. 2003 |
| | CRP were significantly | Aug; 15(86): 115-7. |
| | increased in carcinoma patients | |
| | relative to control group and to | |
| | benign breast tumor group. The | |
| | frequency of higher levels and | |
| | absolute value of IL-6 and CRP | |
| | showed tendency to significant | |
| | increase with the stage of | |
| | disease. A positive correlation | |
| | was observed between the | |
| | concentrations of IL-6 and | |
| | CRP. | |
| type 1 diabetes | elevated CRP levels in infants | Diabetes. 2004 |
| | and young children before the | Oct; 53(10): 2569-73. |
| | onset of type 1 diabetes adds to | |
| | the evidence that the disease is | |
| | an immunoinflammatory | |
| | disorder. The elevated CRP | |
| | levels may provide an | |
| | additional marker for risk of | |
| | progression to type 1 diabetes. | |
| increased risk of incident | High plasma levels of CRP | Diabetes Care. 2004 |
| cardiovascular events | were associated with an | Apr; 27(4): 889-94. |
| | increased risk of incident | |
| | cardiovascular events among | |
| | diabetic men, independent of | |
| | currently established lifestyle | |
| | risk factors, blood lipids, and | |
| | glycemic control. | |
| hypo/hyperalphalipoproteinemias | Plasma CRP levels showed a | Metabolism. 2003 |
| | particularly strong correlation | Apr; 52(4): 432-6. |
| | with plasma HDL-C | |
| | concentrations | |
| penile vascular disease | CRP levels correlate | Int J Impot Res. 2003 |
| | significantly with increasing | Aug; 15(4): 231-6. |
| | severity of penile vascular | |
| | disease as measured by penile | |
| | Doppler. | |
| ischemic events | C-reactive protein predicts | Stroke. 2003 Oct; 34(10): 2463-8. |
| | further ischemic events in first- | Epub 2003 Sep 18. |
| | ever transient ischemic attack | |
| | or stroke patients with | |
| | intracranial large-artery | |
| | occlusive disease. | |
| Peripheral vascular disease | CRP levels where found | Vasc Med. 2004 |
| | correlated with ankle-brachial | May; 9(2): 107-15 |
| | index | |

[1264] According to other optional embodiments of the present invention, variants of this cluster according to the present invention (amino acid and/or nucleic acid sequences of HSCREACT may optionally have one or more of the following utilities, some of which are related to utilities described above. It should be noted that these utilities are optionally and preferably suitable for human and non-human animals as subjects, except where otherwise noted.

[1265] A non-limiting example of such a utility is the detection, diagnosis and/or determination of clinical events such as acute coronary syndrome, in patients with signs and symptoms of suspected cardiac origin. The method comprises detecting a HSCREACT variant, for example a variant protein, protein fragment, peptide, polynucleotide, polynucleotide fragment and/or oligonucleotide as described herein, optionally and preferably in a serum sample. Use of known C reactive protein for diagnosis and risk stratification of clinical events such as acute coronary syndrome, in patients with signs and symptoms of suspected cardiac origin is described with regard to PCT Application No. WO04103150, hereby incorporated by reference as if fully set forth herein. The PCT application describes a method for diagnosis of a clinical condition in a patient or for risk stratification of a patient possibly with the condition, comprising the steps of: a) obtaining from the patient at least one sample of a substance stream which has been in contact with a tissue suspected of undergoing the clinical condition; b) conducting at least a first in vitro diagnostic assay on the sample and optionally additional in vitro diagnostic assays; c) measuring and analyzing the patient's electrocardiogram (ECG); and d) applying an algorithm to combine the results of the assay (s) of step (b) and the electrocardiogram in step (c) using an algorithm to provide a positive or negative diagnosis or risk stratification of the clinical condition. Another example of use of known C reactive protein for diagnosis and evaluation of acute coronary syndromes origin is described with regard to PCT Application No. WO02089657, hereby incorporated by reference as if fully set forth herein. The PCT application describes a method for diagnosis and evaluation of acute coronary syndromes using a panel of markers comprising one or more specific markers for myocardial injury and one or more non-specific markers for myocardial injury. A variety of markers are disclosed for assembling a panel of markers for such diagnosis and evaluation. In various aspects, the invention provides methods for the early detection and differentiation of stable angina, unstable angina, and myocardial infarction. CRP is a nonspecific marker for ACS, and elevations of the CRP concentration in plasma may occur from unrelated conditions involving activation of the immune system. Despite its high degree of non-specificity for ACS, CRP may be useful in the identification of unstable angina and AMI when used with another marker that is specific for cardiac tissue injury. Another example of use of known C reactive protein for diagnosis and distinguishing amongst a plurality of cardiovascular disorders is described with regard to US Application No. US20040253637, hereby incorporated by reference as if fully set forth herein. The US application describes a method for analyzing a subject sample for a plurality of subject-derived markers selected to distinguish amongst a plurality of cardiovascular disorders, comprising: assaying said sample for the presence or amount of one or more subject-derived markers related to blood pressure regulation, and for the presence or amount of one or more subject-derived markers related to myocardial injury, and characterizing said subject's risk of having developed or of developing each of said plurality of cardiovascular disorders based upon the presence or amount of said markers, wherein the amount of at least one of said one or more subject-derived markers is not compared to a predetermined threshold amount.

[1266] Another non-limiting example of a possible utility is the prediction, detection, diagnosis and/or determination of increased risk of system failure or mortality. The method comprises detecting a HSCREACT variant, for example a variant protein, protein fragment, peptide, polynucleotide, polynucleotide fragment and/or oligonucleotide as described herein, optionally and preferably in a serum sample. Use of known C reactive protein for prediction of increased risk of system failure or mortality is described with regard to PCT Application No. WO0196864, hereby incorporated by reference as if fully set forth herein. The PCT application describes a method comprising: a) adding one or more reagents to a test sample from a patient comprising at least part of a blood sample from the patient in order to cause formation of a complex comprising at least one acute phase protein and at least one human lipoprotein, while causing substantially no fibrin polymerization; b) measuring the formation of said complex over time so as to derive a time-dependent measurement profile; and c) determining a slope and/or total change in the time-dependent measurement profile so as to diagnose a condition of the patient. More preferably, wherein said at least one human lipoprotein comprises one or more of chylomicrons or remnants thereof, VLDL, IDL, LDL or HDL, and wherein said at least one acute phase protein comprises CRP.

[1267] Another non-limiting example of preferred utility is the detection, diagnosis and/or determination of haemostatic dysfunction in patients, which can lead to bleeding or thrombosis or particularly to Disseminated Intravascular Coagulation (DIC). The method comprises detecting a HSCREACT variant, for example a variant protein, protein fragment, peptide, polynucleotide, polynucleotide fragment and/or oligonucleotide as described herein, optionally and preferably in a serum sample. Use of known C reactive protein for prediction of haemostatic dysfunction in patients is described with regard to PCT Application No. WO0113125, hereby incorporated by reference as if fully set forth herein. The PCT application describes a method for detecting a precipitate in a test sample in the absence of clot formation. The precipitate detection allows for the prediction haemostatic dysfunction in patients. Preferably, the described method comprising: a) adding a reagent to a test sample comprising at least a component of a blood sample from a patient; b) measuring the formation of a precipitate due to the reaction of the test sample and the reagent, over time so as to derive a timedependent measurement profile, said reagent capable of forming a precipitate in the test sample without causing substantial fibrin polymerization. More preferably, a method for determining in a patient sample the presence of a complex of proteins comprising a C-reactive protein, comprising: a) obtaining a test sample from a patient; b) adding an alcohol, a clot inhibitor, and a metal cation; wherein a precipitate is formed which comprises a complex of proteins including C reactive protein.

[1268] Another non-limiting example of preferred utility is the differential diagnosis of diseases and conditions, that exhibit one or more similar or identical symptoms, such as dyspnea, fever, chest pain, abdominal pain, disturbances in metabolic state, neurologic dysfunction, hypertension, dizziness, and headache. The method comprises detecting a HSCREACT variant, for example a variant protein, protein fragment, peptide, polynucleotide, polynucleotide fragment and/or oligonucleotide as described herein, optionally and preferably in a serum sample. Use of known C reactive protein for differential diagnosis of diseases and conditions, that exhibit one or more similar or identical symptoms, such as dyspnea, fever, chest pain, abdominal pain, disturbances in metabolic state, neurologic dysfunction, hypertension, dizziness, and headache is described with regard to PCT Application No. WO2004059293, hereby incorporated by reference as if fully set forth herein. The PCT application describes a method for differential diagnosis of diseases and conditions, that exhibit one or more similar or identical symptoms, such as dyspnea, fever, chest pain, abdominal pain, disturbances in metabolic state, neurologic dysfunction, hypertension, dizziness, and headache.

[1269] The clinical presentation of certain diseases and conditions can often be strikingly similar, even though the underlying diseases, and the appropriate treatments to be given to one suffering from the various diseases, can be completely distinct. Differential diagnosis methods involve the comparison of symptoms and/or diagnostic test results known to be associated with one or more diseases that exhibit a similar clinical presentation to the symptoms and/or diagnostic results exhibited by the subject, in order to identify the underlying disease or condition present in the subject. In the case of dyspnea, the plurality of markers are preferably selected to rule in or out one or more, and preferably a plurality, of the following diagnoses: asthma, atrial fibrillation, chronic obstructive pulmonary disease (“COPD”), tracheal stenosis, obstructive endobroncheal tumor, pulmonary fibrosis, pneumoconiosis, lymphangitic carcinoniatosis, kyphoscoliosis, pleural effusion, amyotrophic lateral sclerosis, congestive heart failure, coronary artery disease, myocardial infarction, acute coronary syndrome, cardiomyopathy, valvular dysfunction, left ventricle hypertrophy, pericarditis, arrhythmia, pulmonary embolism, metabolic acidosis, chronic bronchitis, pneumonia, anxiety, sepsis, or aneunismic dissection. In a particularly preferred embodiment, the methods relate to defining the cause of dyspnea to rule in or rule out myocardial ischemia and cardiac necrosis, heart failure and pulmonary embolism. In yet another particularly preferred embodiment, the methods relate to defining the cause of dyspnea to rule in or rule out myocardial ischemia and cardiac necrosis, heart failure, pulmonary embolism and atrialfibrillation. The plurality of markers may also be used for prediction of risk that a subject may suffer from a future clinical outcome such as death or one or more nonfatal complications such as might require rehospitalization. In the case of abdominal pain, the plurality of markers are preferably selected to rule in or out a plurality of the following: aortic aneurysm, mesenteric embolism, pancreatitis, appendicitis, myocardial infarction, one or more infectious diseases described above, 5 influenza esophageal carcinoma, gastric adenocarcinoma, colorectal adenocarci 2 noma, pancreatic tumors including ductal adenocarcinoma, cystadenocarcinonia, and insulinoma. In the case of disturbances of metabolic state, the plurality of markers are preferably selected to rule in or out a plurality of the following: diabetes mellitus, diabetic ketoacidosis, alcoholic ketoacidosis, respiratory acidosis, respiratory alkalosis, nonketogenic hyperglycemia, hypoglycemia, renal failure, interstitial renal disease, COPD, pneumonia, pulmonary and edema, asthma. Such panels may diagnose one or more, and preferably distinguish between a plurality of, cardiovascular disorders selected from the group consisting of myocardial infarction, congestive heart failure, acute coronary syndrome, ST elevated ACS, non-ST elevated ACS, unstable angina, and/or pulmonary embolism; and/or predict risk that a subject may suffer from a future clinical outcome such as death, nonfatal myocardial infarction, recurrent ischemia requiring urgent revascularization, and/or recurrent ischemia requiring rehospitalization; and/or predict a risk of a future outcome in such diseases. Still other particularly preferred markers are those predictive of a subsequent cerebral vasospasm in patients presenting with subarachnoid hemorrhage, such as one or more markers related to blood pressure regulation, markers related to inflammation, markers related to apoptosis, and/or specific markers of neural tissue injury. In the case of neurologic dysfunction, the plurality of markers are preferably selected to rule in or out a plurality of the following: stroke, brain tumor, cerebral hypoxia, hypoglycemia, migraine, atrial fibrillation, myocardial infarctio'n, cardiac ischemia, peripheral vascular disease and seizure.

[1270] The WO2004059293 application preferably describes a method of symptom-based diagnosis of a subject, comprising: analyzing a test sample obtained from said subject for the presence or amount of a plurality of subject-derived markers, wherein said markers are selected to identify the presence or absence in said subject of a plurality of conditions within the differential diagnosis of a symptom exhibited by said subject; and correlating the presence or amount of said markers in said test sample to the presence or absence of each of said plurality of conditions. The WO2004059293 application further describes a method as above, wherein said symptom is selected from the group consisting of dyspnea, fever, chest pain, abdominal pain, disturbances in metabolic state, neurologic dysfunction, hypertension, dizziness, and headache. The WO2004059293 application further describes a method as above, wherein said symptom is dyspnea, and said plurality of conditions are selected from the group consisting of asthma, chronic obstructive pulmonary disease (“COPD”), tracheal stenosis, obstructive endobroncheal tumor, pulmonary fibrosis, pneumoconiosis, lymphangitic carcinomatosis, kyphoscoliosis, pleural effusion, amyotrophic lateral sclerosis, congestive heart failure, coronary artery disease, myocardial infarction, atrial fibrillation, cardiomyopathy, valvular dysfunction, left ventricle hypertrophy, pericarditis, arrhythmia, pulmonary embolism, metabolic acidosis, chronic bronchitis, pneumonia, anxiety, sepsis, and aneurismic dissection, myocardial infarction and pulmonary embolism, myocardial infarction and congestive heart failure, pulmonary embolism and congestive heart failure, or myocardial infarction, pulmonary embolism, and congestive heart failure. The WO2004059293 application further describes a method as above, wherein said symptom is chest pain, and said plurality of conditions are selected from the group consisting of stable angina, unstable angina, myocardial ischemia, cardiac necrosis, atrial fibrillation, myocardial infarction, musculoskeletal injury, cholecystitis, gastroesophageal reflux, pulmonary embolism, pericarditis, aortic dissection, pneumonia, anxiety, aortic dissection, myocardial ischemia, myocardial necrosis, myocardial infarction, and atrial fibrillation. The WO2004059293 application further describes a method as above, wherein said symptom is abdominal pain, and said plurality of conditions are selected from the group consisting of aortic dissection, mesenteric embolism, pancreatitis, appendicitis, myocardial ischemia, myocardial infarction, an infectious disease, influenza, esophageal carcinoma, gastric adenocarcinoma, colorectal adenocarcinoma, pancreatic ductal adenocarcinoma, cystadenocarcinoma, and insulinoma. The WO2004059293 application further describes a method as above, wherein said symptom is neurologic dysfunction, and said plurality of conditions are selected from the group consisting of stroke, ischemic stroke, subarachnoid hemorrhage, transient ischemic attack, intracerebral hemorrhage, hemorrhagic stroke, brain tumor, cerebral hypoxia, hypoglycemia, migraine, atrial fibrillation, myocardial infarction, cardiac ischemia, peripheral vascular disease, migraine, and seizure, ischemic stroke, hemorrhagic stroke, transient ischemic attack, atrial fibrillation, myocardial ischemia, and myocardial infarction.

[1271] Another non-limiting example of preferred utility is the detection, diagnosis and/or determination of multiple sclerosis, Alzheimer's disease and ischemia.

The method comprises detecting a HSCREACT variant, for example a variant protein, protein fragment, peptide, polynucleotide, polynucleotide fragment and/or oligonucleotide as described herein, optionally and preferably in a serum sample.

[1272] Use of known C reactive protein for diagnosing or monitoring various diseases including multiple sclerosis, Alzheimer's disease and ischemia is described with regard to PCT Application No. WO2004030522, hereby incorporated by reference as if fully set forth herein. The PCT application describes a method for diagnosis and monitoring of diseases and conditions by quantifying markers, including degradation products of disease-associated proteins, such as diketopiperazines composed of the two N-terminal amino acids or the two C-terminal amino acids of such proteins. The methods are useful for diagnosing or monitoring various diseases, including multiple sclerosis, rheumatoid arthritis, acute respiratory distress syndrome, cystic fibrosis, diabetes mellitus, Alzheimer's disease, Parkinson's disease, inflammation, ischemia, cerebral ischemia, placental ischemia, myocardial infarction, prostate cancer, pancreatitis, emphysema, renal disease, cancer, chemotherapy, hemoglobinopathies, anemnias or congestive heart failure.

[1273] Another non-limiting example of preferred utility is the detection, diagnosis, monitoring and/or determination of various conditions, including but not limited to bacterial infections, tumors associated with necrosis, acute myocardial infarction, acute inflammation phases of rheumatoid arthritis and transplant rejection, acute appendicitis, and inflammatory bowel disease and cardiovascular disease. The method comprises detecting a HSCREACT variant, for example a variant protein, protein fragment, peptide, polynucleotide, polynucleotide fragment and/or oligonucleotide as described herein, optionally and preferably in a serum sample. A method for use of known C reactive protein for diagnosing or monitoring various conditions including but not limited to bacterial infections, tumors associated with necrosis, acute myocardial infarction, acute inflammation phases of rheumatoid arthritis and transplant rejection, acute appendicitis, and inflammatory bowel disease and cardiovascular disease is described with regard to PCT Application No. WO2004025248, hereby incorporated by reference as if fully set forth herein.

[1274] C-reactive protein (CRP) is an acute phase reactant that is measured in order to assess the upper respiratory differential (URD) of patients. The concentration of CRP increases several-fold in response to different types of tissue damage and inflammation (Crockson et al, 1966). CRP is considered to be a prototypic acute phase reactant, synthesized in the liver as part of a coordinated response by hepatocytes to tissue injury or inflammation. Also, results from the 1997 Physicians Health Study have sparked interest in the utility of C-reactive protein (CRP) as being a significant disease indicator, particularly for males aged 40-84 (Luhr and Modi, 2000; Ridker et al, 1997). A rapid and accurate method for measuring CRP is needed to distinguish between allergic responses and viral and bacterial infections, and thereby to avoid unnecessary prescription of antibiotics.

[1275] The WO2004025248 application describes antibody pair screening methods for measuring CRP for rapid and accurate diagnosis and monitoring of various conditions including but not limited to bacterial infections, tumors associated with necrosis, acute myocardial infarction, acute inflammation phases of rheumatoid arthritis and transplant rejection, acute appendicitis, and inflammatory bowel disease and cardiovascular diseases.

[1276] Another non-limiting example of preferred utility is the early detection, diagnosis, monitoring and/or determination of sepsis. The method comprises detecting a HSCREACT variant, for example a variant protein, protein fragment, peptide, polynucleotide, polynucleotide fragment and/or oligonucleotide as described herein, optionally and preferably in a serum sample. A method for use of known C reactive protein for early detection of sepsis is described with regard to PCT Application No. WO03084388, hereby incorporated by reference as if fully set forth herein. The PCT describes A method of detecting early sepsis in a patient, wherein said method comprising the steps of. a) monitoring a plurality of biological markers over a period of time, b) independently deriving for each marker a marker statistic that is a statistical measure of extreme value of said marker over said period of time, and c) applying a decision rule to the marker statistics from step (b) to detect early sepsis in said patient.

[1277] Another non-limiting example of preferred utility is the early detection, diagnosis, monitoring and/or determination of host response to infection, systematic inflammatory response syndrome, or sepsis, involves correlating the lipoprotein measurement to an abnormality found in patients having severe infection. The method comprises detecting a HSCREACT variant, for example a variant protein, protein fragment, peptide, polynucleotide, polynucleotide fragment and/or oligonucleotide as described herein, optionally and preferably in a serum sample. A method for use of known C reactive protein for diagnosing and monitoring hemostatic dysfunction, severe infection and systematic inflammatory response syndrome is described with regard to PCT Application No. WO03073099, hereby incorporated by reference as if fully set forth herein. As described in WO 01/96864 (Dec. 20, 2001), a calcium-dependent complex between C reactive protein (CRP) and lipoprotein (particularly very low density lipoprotein (VLDL)) has been identified as the molecular mechanism underlying the biphasic waveform. The complex may be used to identify patients with sepsis, SIRS and septicaernia in addition to patients with other hemostatic dysfunction that can lead to bleeding or thrombosis including DIC. Further, WO 01/96864 describes detecting the complex by a clotting assay, latex agglutination or gold sol assay, and immunoassay whereby the precipitate is formed prior to or in the absence of clot formation, depending on the reagent used.

[1278] Another non-limiting example of preferred utility is for diagnostic assays for determining drug responsiveness. The method comprises detecting a HSCREACT variant, for example a variant protein, protein fragment, peptide, polynucleotide, polynucleotide fragment and/or oligonucleotide as described herein, optionally and preferably in a serum sample. A method for use of known C reactive protein for determining drug responsiveness is described with regard to PCT Application No. WO03062792, hereby incorporated by reference as if fully set forth herein. The PCT provides diagnostic assays for measuring the response to a drug or steroid by comparing mRNA levels expressed by a gene that is expected to respond to the drug to mRNA levels expressed by a gene that is not expected to respond to the drug. The assay also can be carried out at the protein level, by comparing the concentrations and/or activities (for example enzymatic activities) of the proteins corresponding to these mRNA species. The invention is based on observations that the expression of drug-sensitive genes, or changes in the expression of drug-sensitive genes, are useful as a marker for the cellular response to the drug or steroid. For example, the steroid responsive and non-responsive genes may be chosen depending upon their ability to respond to IL-1 and IL-6, administered separately or in combination, with or without steroids. For example, both the SA,41 gene and SA,42 genes respond to IL-1 strongly and IL-6 weakly, but only the responses of the SA,41 gene are augmented by glucocorticoid administration. By comparison, the C reactive protein gene (CRP) responds weakly to IL-1 and strongly to IL-6, and both responses are augmented by glucocorticoid administration. The SAA genes and the CRP gene therefore are markers for subsets of genes that respond differentially to certain cy-tokines alone or in combination with steroids and/or other drugs. Thus, a comparison of the RNA or protein levels of the SAA genes and the CRP genes, and/or other genes, may provide useful RNA or protein profiles which predict, determine, measure or monitor a subject's ability to respond to steroids at certain points during an acute phase response (i.e., depending upon the “Mix” of cytokines present at that point in time) or to certain cytokines, cytokine antagonists, antiinflammatory or other drug treatments in the absence of, or in combination with, endogenous or exogenous (i.e., therapeutically administered) steroids.

[1279] Another non-limiting example of preferred utility is for the detection, diagnosis and/or determination of disorders of iron metabolism, and subsequent recommendation for the treatment of these disorders. The method comprises detecting a HSCREACT variant, for example a variant protein, protein fragment, peptide, polynucleotide, polynucleotide fragment and/or oligonucleotide as described herein, optionally and preferably in a serum sample. A method for use of known C reactive protein for a method for detecting disorders of iron metabolism is described with regard to PCT Application No. WO03025583 and US application US20030232393, hereby incorporated by reference as if fully set forth herein. The PCT provides a method for detecting disorders of iron metabolism and in particular the differential diagnosis of disorders of iron metabolism by means of three independent parameters. The differential diagnosis can be used to classify disorders of iron metabolism and to recommend the required treatment and to monitor the progress and response to treatment. The PCT and the US applications provide a method for determining disorders of iron metabolism comprising the determination of: (i) a parameter which allows a determination of the total body iron stores, (ii) a parameter which allows a determination of at least one of the erythropoietic maturation process and its activity, and (iii) a parameter which allows a determination of unspecific disorders of iron metabolism. Wherein the parameter (i) in the method above is at least one of erythrocyte ferritin, zinc protoporphyrin, haemoglobin, myoglobin, transferrin, transferrin saturation, ferritin, haemosiderin, catalase, peroxidase and cytochrome; the parameter (ii) is at least one of erythrocyte indices, reticulocyte indices, FS-e (forward scatter erythrocytes) and soluble transferrin receptor (sTfR); and the parameter (iii) is at least one of acute phase proteins, regulators of acute phase protein synthesis and disorders of reticulocyte synthesis. C-reactive protein (CRP) is an examples of acute phase protein whose amount or concentration is determined in order to determine unspecific disorders of iron metabolism.

[1280] Another non-limiting example of preferred utility is for the detection, diagnosis and/or determination of stroke and cerebral injury. The method comprises detecting a HSCREACT variant, for example a variant protein, protein fragment, peptide, polynucleotide, polynucleotide fragment and/or oligonucleotide as described herein, optionally and preferably in a serum sample. A method for use of known C reactive protein for the diagnosis and evaluation of stroke and transient ischemic attacks is described with regard to PCT Application No. WO03016910, hereby incorporated by reference as if fully set forth herein. The PCT provides a method for the diagnosis and evaluation of stroke and transient ischemic attacks by, for example, by analyzing patient's samples for the presence or amount of a panel of markers comprising one or more specific markers for cerebral injury and one or more non-specific markers for cerebral injury. In various aspects, the invention provides methods for early detection and differentiation of stroke types and transient ischemic attacks, for determining the prognosis of a patient presenting with stroke symptoms, and identifying a patient at risk for cerebral vasospasm. According to the PCT, CRP may be useful in the identification of unstable angina and AMI when used with another marker that is specific for cardiac tissue injury.

[1281] Another non-limiting example of preferred utility is for the detection, diagnosis and/or determination of liver disfunction. The method comprises detecting a HSCREACT variant, for example a variant protein, protein fragment, peptide, polynucleotide, polynucleotide fragment and/or oligonucleotide as described herein, optionally and preferably in a serum sample. A method for use of known C reactive protein for the detection, diagnosis and/or determination of liver disfunction is described with regard to PCT Application No. WO03012450, hereby incorporated by reference as if fully set forth herein. The PCT provides a method for detecting and monitoring liver damage in a subject, by measuring a panel of components, including kallikrein-like peptidase, along with other blood enzymes and/or complement components. The liver damage panel members might include complement components O a, C4a, C I s and MASP-1, plasma prekallikrein and kallikrein/inhibitor (e.g. alpha macroglobulin and C I inhibitor) complexes, as well as serum amyloid protein (SAP) and/or C-reactive protein (CRP) representing acute phase proteins.

[1282] Another non-limiting example of preferred utility is for the detection, diagnosis and/or determination of deep venous thrombosis (DVT). The method comprises detecting a HSCREACT variant, for example a variant protein, protein fragment, peptide, polynucleotide, polynucleotide fragment and/or oligonucleotide as described herein, optionally and preferably in a serum sample. A method for use of known C reactive protein for the detection, diagnosis and/or determination of deep venous thrombosis is described with regard to US patent Application No. US20040029286, hereby incorporated by reference as if fully set forth herein. The US application provides diagnostic method for patients with suspected deep venous thrombosis wherein by combined testing of patients' samples for D-dimer and CRP both the sensitivity and the negative predictive value of DVT diagnostics are increased up to 100%. A method for the diagnostic exclusion of the presence of deep venous thrombosis (DVT) in a patient at risk, comprising the following steps: (a) testing of a liquid sample from said patient with a reagent for the detection of D-dimer; (b) evaluation of the test result: (i) if the D-dimer concentration is found to be equal to or above a predefined cut-off value, DVT is not excluded with said patient; (ii) if the D-dimer concentration is found to be below the said cut-off value, further testing according to (c) is performed: (c) testing of a liquid sample from said patient with a reagent for the detection of C-reactive protein (CRP); (d) evaluation of the test result: if the CRP-concentration is found below a predefined cut-off value, DVT is excluded with said patient.

[1283] Another non-limiting example of preferred utility is for the detection, diagnosis and/or determination of arteriosclerosis. The method comprises detecting a HSCREACT variant, for example a variant protein, protein fragment, peptide, polynucleotide, polynucleotide fragment and/or oligonucleotide as described herein, optionally and preferably in a serum sample. A method for use of known C reactive protein for the detection, diagnosis and/or determination of arteriosclerosis is described with regard to US patent Application No. US20030077668, hereby incorporated by reference as if fully set forth herein. The US application provides a method for detecting LDL and denatured LDL (particularly, oxidized LDL) having a significant concerning with the onset and progress of arteriosclerosis and Alzheimer's disease, wherein a complex of denatured low density lipoprotein (particularly, oxidized LDL) with an acute phase reactant, blood coagulation fibrinolytic related protein or disinfectant substance produced by macrophage is used as a measuring subject. C-reactive protein (CRP) is an example of the acute phase reactant protein above.

[1284] Another non-limiting example of preferred utility is for assessing pentraxin-binding of particles for use in diagnosis of disease or abnormality, such as immune or autoimmune disorders, inflammatory disorders, sepsis, bacterial infection or cancer. The method comprises detecting a HSCREACT variant, for example a variant protein, protein fragment, peptide, polynucleotide, polynucleotide fragment and/or oligonucleotide as described herein, optionally and preferably in a serum sample. A method for use of known C reactive protein for assessing pentraxin-binding of particles for use in diagnosis of disease or abnormality, such as immune or autoimmune disorders, inflammatory disorders, sepsis, bacterial infection or cancer is described with regard to US patent Application No. US20030022245, hereby incorporated by reference as if fully set forth herein. The US application describes a method of assessing pentraxin-binding of particles for use in diagnosis of disease or abnormality, comprising: (a) exposing a biological test sample containing particles that comprise a pentraxin-binding receptor from a test subject to a ligand comprising a pentraxin in the presence of calcium; (b) determining quantitatively the level of binding between particles and ligand in said test sample; and (c) comparing the level of binding in said test sample to the level of binding in a control biological sample containing said particles from a healthy subject of the same species as the subject supplying the test sample, wherein a change in the level of binding in said test sample from that of the control sample is indicative of disease or abnormality, wherein the said pentraxin is C-reactive protein. The US application preferably describes the above method wherein an increase or decrease in the level of CRP bound to particles or the number of CRP-particles bound to cells, in said test sample over the same percentage or number in said control sample is indicative of an immune or auto-immune disorder. The US application more preferably describes the above method wherein said disorder is selected from the group consisting of diabetes, multiple sclerosis, Sjorgen's Syndrome rheumatoid arthritis, and systemic lupus erythematosis. The US application more preferably describes the above method wherein a decrease in the percentage of CRP-bound particles or the number of CRP-articles bound per cell, in said test sample over the said same percentage or number in said control sample is indicative of an inflammatory disorder or sepsis. The US application more preferably describes the above method wherein bound per cell, in said test sample over the same percentage or number in said control sample is indicative of cancer. The US application further describes the above method comprising examining the binding of said CRP in a fluorescent activated cell sorting assay and generating a light scatter region, wherein a decrease in the appearance of a distinct cluster of CRP-bound cells in a light scatter region equivalent to that of lymphocytes in said test sample of an infected mammal over the same percentage in an uninfected control is indicative of the presence of a bacterial infection.

[1285] Another non-limiting example of preferred utility is for the detection, diagnosis and/or determination of Bladder cancer. The method comprises detecting a HSCREACT variant, for example a variant protein, protein fragment, peptide, polynucleotide, polynucleotide fragment and/or oligonucleotide as described herein, optionally and preferably in a serum sample. A method for use of known C reactive protein for the detection, diagnosis and/or determination of Bladder cancer is described with regard to No. U.S. Pat. No. 4,447,545, hereby incorporated by reference as if fully set forth herein. The US patent discloses a method for screening populations to detect potential bladder cancer patients. The screening test is based on a discovered correlation between the respective ratios of C-reactive protein to total protein in urine and serum and the incidence of bladder cancer. The above method for screening a patient for the presence of a bladder carcinoma, comprising the steps of: (A) assaying for the ratio of C-reactive protein to total protein in a sample of the urine of said patient; (B) assaying for the ratio of C-reactive protein to total protein in a sample of the serum of said patient; and (C) comparing the ratio determined by assay in step A to the ratio determined by assay in step B, whereby (i) a finding of the absence of C-reactive protein in said urine sample is indicative of the absence of a bladder carcinoma; and (ii) a finding that the ratio determined in step A is greater than the ratio determined in step B is indicative of the presence of a bladder carcinoma.

[1286] Another non-limiting example of preferred utility is for the detection, diagnosis and/or determination of macular degeneration. The method comprises detecting a HSCREACT variant, for example a variant protein, protein fragment, peptide, polynucleotide, polynucleotide fragment and/or oligonucleotide as described herein, optionally and preferably in a serum sample. Macular degeneration is a clinical term that is used to describe a variety of diseases that are all characterized by a progressive loss of central vision associated with abnormalities of Bruch's membrane, the neural retina and the retinal pigment epithelium. A method for use of known C reactive protein for the detection, diagnosis and/or determination of macular degeneration is described with regard to PCT application No. WO0106262, hereby incorporated by reference as if fully set forth herein. The PCT discloses a method for diagnosing macular degeneration (MD), especially age-related macular degeneration (AMD), exudative or neovascular forms, by detecting a marker for arterial wall disruptive disorder, particularly abdominal aortic aneurysm. According to the above method of diagnosing macular degeneration, the said marker is for example, Complement reactive protein (CRP). Another example of use of known Complement reactive protein for for the detection, diagnosis and/or determination of macular degeneration is described with regard to PCT application No. WO0052479, and US patent application No: US20030149997, all hereby incorporated by reference as if fully set forth herein. The US application provides diagnostics, therapeutics and drug screening assays for arterial wall disruptive disorders, based on the discovery of a high level of correlation between the incidence of arterial wall disruptive disorders and the incidence of Age Related Macular Degeneration (AMD). In one embodiment, the arterial wall disruptive disorder is an aortic aneurysm. The above method for diagnosing, or determining a predisposition to developing, an arterial wall disruptive disorder in a subject, comprising detecting one or more genotypic or phenotypic markers for macular degeneration in the eye, wherein said marker is indicative of arterial wall disruptive disorder or of a predisposition to developing arterial wall disruptive disorder. The said drusen-associated marker is for example, complement reactive protein (CRP).

[1287] Another non-limiting example of preferred utility is for early diagnosis of premalignant lesions or determining prognosis of malignant lesions. The method comprises detecting a HSCREACT variant, for example a variant protein, protein fragment, peptide, polynucleotide, polynucleotide fragment and/or oligonucleotide as described herein, optionally and preferably in a serum sample. A method for use of known Complement reactive protein for early diagnosis of premalignant lesions or determining prognosis of malignant lesions is described with regard to US patent application No. US20030129677, hereby incorporated by reference as if fully set forth herein. The US application discloses a method for early diagnosis of premalignant lesions or determining prognosis of malignant lesions in patients by measuring quantity of complement regulatory protein-anti-CRP antibody complex as compared to normal level, in a sample.

[1288] Another non-limiting example of preferred utility is for the early detection of pregnancy failure, spontaneous abortion or premature birth. The method comprises detecting a HSCREACT variant, for example a variant protein, protein fragment, peptide, polynucleotide, polynucleotide fragment and/or oligonucleotide as described herein, optionally and preferably in a serum sample. A method for use of known Complement reactive protein for the early detection of pregnancy failure, spontaneous abortion or premature birth is described with regard to US patent application No. US20030129674, hereby incorporated by reference as if fully set forth herein. The US application discloses a method for diagnosing a predisposition for pregnancy failure, spontaneous abortion or premature birth in a pregnant patient comprising: (a) contacting a physiological fluid potentially comprising a cell membrane-associated complement regulatory protein (CRP) from the patient with a anti-CRP antibody to form an CRP-antibody complex; and (b) measuring the quantity of CRP-antibody complex in the physiological fluid as compared to a normal control level, wherein the quantity of CRP-antibody complex as compared to the normal control is indicative for a predisposition for pregnancy failure, spontaneous abortion or premature birth.

[1289] Cluster HSCREACT belongs to a family of proteins which are known to have functions related to neuronal associated disorders, including but not limited to, APCS (Amyloid P), NPTX1, NPTXR, NPTX2, PTX3, PAPPA & PAPPA2. These functions are described below; one or more variants of cluster HSCREACT may optionally have one or more diagnostic utilities related to these functions.

[1290] APCS (Amyloid P) deposit, and radiolabeled SAP is a specific, sensitive, quantitative diagnostic tracer for systemic amyloid deposits in vivo (Lovat L B, et al. Scintigraphy with 123]-serum amyloid P component in Alzheimer disease. Alzheimer Dis Assoc Disord. 1998 September; 12(3):208-10; Hawkins P N, Myers M J, Lavender J P, et al. Diagnostic radionuclide imaging of amyloid: biological targeting by circulating human serum amyloid P component. Lancet 1988; i:1413-1418).

[1291] NPTX1 is overexpressed in Szchizophrenia (Gabor et al. Nature Biotech. 22 (5) 615-621-2004). Based on its function and expression profile, NPTX1 could play a role in the development of GTS (Tourette and OCD): (Zhang, H et al. Genomewide scan of hoarding in sib pairs in which both sibs have Gilles de la Tourette syndrome. Am. J. Hum. Genet. 70: 896-904, 2002.). NPTX1 is a among a group of Neuronal-associated genes in melanoma (Seftor et al. Expression of multiple molecular phenotypes by aggressive melanoma tumor cells: role in vasculogenic mimicry Critical Reviews in Oncology/Hematology 000 (2001) 000-000 (uncorrected proof));

[1292] All of these functions may optionally be diagnostic utilities of one or more HSCREACT variants according to the present invention.

[1293] Table 99 below describes diagnostic utilities for the cluster HSCREACT that were found through microarrays, including the statistical significance thereof and a reference. One or more HSCREACT variants according to the present invention may optionally have one or more of these utilities.

TABLE 99

| | Statistical | |
|---|---|---|
| Diagnostic utility | significance | reference |
| Gene over expressed | 0.003 | 1. Segal NH, Houghton AN. J |
| in melanoma (vs. Soft | | Clin Oncol (2003) Classification |
| Tissue Sarcoma) | | of clear-cell sarcoma as a |
| | | subtype of melanoma by |
| | | genomic profiling. |

[1294] Other non-limiting exemplary utilities for HSACMHCP variants according to the present invention are described in greater detail below and also with regard to the previous section on clinical utility.

[1295] As noted above, cluster HSCREACT features 10 transcript(s), which were listed in Table 94 above. These transcript(s) encode for protein(s) which are variant(s) of protein C-reactive protein precursor (SEQ ID NO:316). A description of each variant protein according to the present invention is now provided.

[1296] Variant protein HSCREACT_PEA_{—}1_P9 (SEQ ID NO:317) according to the present invention has an amino acid sequence; it is encoded by transcript(s) HSCREACT_PEA_{—}1_T12 (SEQ ID NO:251). An alignment is given to the known protein (C-reactive protein precursor (SEQ ID NO:316)) at the end of the application. One or more alignments to one or more previously published protein sequences are given in the alignment table located on the attached CDROM. A brief description of the relationship of the variant protein according to the present invention to each such aligned protein is as follows:

[1297] Comparison report between HSCREACT_PEA_{—}1_P9 (SEQ ID NO:317) and CRP_HUMAN (SEQ ID NO:316):

[1298] 1. An isolated chimeric polypeptide encoding for HSCREACT_PEA_{—}1_P9 (SEQ ID NO:317), comprising a first amino acid sequence being at least 90% homologous to MEKLLCFLVLTSLSHAFGQTDMSRKAFVFPKESDTSYVSLKAPLTKPLKAFTVCLHFYTELSST corresponding to amino acids 1-64 of CRP_HUMAN (SEQ ID NO:316), which also corresponds to amino acids 1-64 of HSCREACT_PEA_{—}1_P9 (SEQ ID NO:317), a second amino acid sequence bridging amino acid sequence comprising of H, and a third amino acid sequence being at least 90% homologous to EINTIYLGGPFSPNVLNWRALKYEVQGEVFTKPQLWP corresponding to amino acids 188-224 of CRP_HUMAN (SEQ ID NO:316), which also corresponds to amino acids 66-102 of HSCREACT_PEA_{—}1_P9 (SEQ ID NO:317), wherein said first amino acid sequence, second amino acid sequence and third amino acid sequence are contiguous and in a sequential order.

[1299] 2. An isolated polypeptide encoding for an edge portion of HSCREACT_PEA_{—}1_P9 (SEQ ID NO:317), comprising a polypeptide having a length “n”, wherein n is at least about 10 amino acids in length, optionally at least about 20 amino acids in length, preferably at least about 30 amino acids in length, more preferably at least about 40 amino acids in length and most preferably at least about 50 amino acids in length, wherein at least two amino acids comprise

[1300] THE having a structure as follows (numbering according to HSCREACT_PEA_{—}1_P9 (SEQ ID NO:317)): a sequence starting from any of amino acid numbers 64−x to 64; and ending at any of amino acid numbers 66+((n−2)−x), in which x varies from 0 to n−2.

[1301] The location of the variant protein was determined according to results from a number of different software programs and analyses, including analyses from SignalP and other specialized programs. The variant protein is believed to be located as follows with regard to the cell: secreted. The protein localization is believed to be secreted because both signal-peptide prediction programs predict that this protein has a signal peptide, and neither trans-membrane region prediction program predicts that this protein has a trans-membrane region.

[1302] The phosphorylation sites of variant protein HSCREACT_PEA_{—}1_P9 (SEQ ID NO:317), as compared to the known protein C-reactive protein precursor (SEQ ID NO:316), are described in Table 100 (given according to their position(s) on the amino acid sequence in the first column; the second column indicates whether the phosphorylation site is present in the variant protein; and the last column indicates whether the position is different on the variant protein).

TABLE 100
Phosphorylation site(s)

| Position(s) on known | Present in | Position in |
|---|---|---|
| amino acid sequence | variant protein? | variant protein? |
| 19 | yes | 19 |

[1303] The variant protein has the following domains, as determined by using InterPro. The domains are described in Table 101:

TABLE 101
InterPro domain(s)

| | Domain | | Position(s) |
|---|---|---|---|
| InterPro ID | description | Analysis type | on protein |
| IPR001759 | Pentaxin | HMMPfam | 25-64, 66-98 |
| IPR001759 | Pentaxin | HMMSmart | 19-102 |
| IPR001759 | Pentaxin | BlastProDom | 19-64, 79-102 |

[1304] Variant protein HSCREACT_PEA_{—}1_P9 (SEQ ID NO:317) is encoded by the following transcript(s): HSCREACT_PEA_{—}1_T12 (SEQ ID NO:251). The coding portion of transcript HSCREACT_PEA_{—}1_T12 (SEQ ID NO:251) starts at position 117 and ends at position 422. The transcript also has the following SNPs as listed in Table 102 (given according to their position on the nucleotide sequence, with the alternative nucleic acid listed; the last column indicates whether the SNP is known or not; the presence of known SNPs in variant protein HSCREACT_PEA_{—}1_P9 (SEQ ID NO:317) sequence provides support for the deduced sequence of this variant protein according to the present invention).

TABLE 102
Nucleic acid SNPs

| SNP position on | Alternative | Previously |
|---|---|---|
| nucleotide sequence | nucleic acid | known SNP? |
| 11 | G -> C | Yes |
| 11 | G -> T | Yes |
| 90 | T -> | No |
| 90 | T -> C | No |
| 129 | T -> | No |
| 164 | T -> | No |
| 194 | T -> | No |
| 317 | T -> C | No |
| 420 | C -> | No |
| 420 | C -> G | No |
| 527 | C -> T | Yes |
| 641 | C -> A | Yes |
| 649 | C -> T | Yes |
| 891 | C -> A | Yes |
| 893 | C -> T | No |
| 1139 | T -> | No |
| 1212 | T -> C | Yes |
| 1233 | C -> T | Yes |
| 1310 | T -> C | Yes |
| 1315 | C -> T | Yes |
| 1318 | C -> T | Yes |
| 1334 | C -> T | Yes |
| 1426 | C -> T | Yes |
| 1498 | A -> T | Yes |
| 1507 | G -> A | Yes |

[1305] Variant protein HSCREACT_PEA_{—}1_P10 (SEQ ID NO:318) according to the present invention has an amino acid sequence; it is encoded by transcript(s) HSCREACT_PEA_{—}1_T3 (SEQ ID NO:252). An alignment is given to the known protein (C-reactive protein precursor (SEQ ID NO:316)) at the end of the application. One or more alignments to one or more previously published protein sequences are given in the alignment table located on the attached CDROM. A brief description of the relationship of the variant protein according to the present invention to each such aligned protein is as follows:

[1306] Comparison report between HSCREACT_PEA_{—}1_P10 (SEQ ID NO:318) and CRP_HUMAN (SEQ ID NO:316):

[1307] 1. An isolated chimeric polypeptide encoding for HSCREACT_PEA_{—}1_P10 (SEQ ID NO:318), comprising a first amino acid sequence being at least 90% homologous to MEKLLCFLVLTSLSHAFGQTDMSRKAFVFPKESDTSYVSLKAPLTKPLKAFTVCLHFYTELSSTRG corresponding to amino acids 1-66 of CRP_HUMAN (SEQ ID NO:316), which also corresponds to amino acids 1-66 of HSCREACT_PEA_{—}1_P10 (SEQ ID NO:318).

[1308] The location of the variant protein was determined according to results from a number of different software programs and analyses, including analyses from SignalP and other specialized programs. The variant protein is believed to be located as follows with regard to the cell: secreted. The protein localization is believed to be secreted because both signal-peptide prediction programs predict that this protein has a signal peptide, and neither trans-membrane region prediction program predicts that this protein has a trans-membrane region.

[1309] The phosphorylation sites of variant protein HSCREACT_PEA_{—}1_P10 (SEQ ID NO:318), as compared to the known protein C-reactive protein precursor (SEQ ID NO:316), are described in Table 103 (given according to their position(s) on the amino acid sequence in the first column; the second column indicates whether the phosphorylation site is present in the variant protein; and the last column indicates whether the position is different on the variant protein).

TABLE 103
Phosphorylation site(s)

| Position(s) on known | Present in | Position in |
|---|---|---|
| amino acid sequence | variant protein? | variant protein? |
| 19 | yes | 19 |

[1310] The variant protein has the following domains, as determined by using InterPro. The domains are described in Table 104:

TABLE 104
InterPro domain(s)

| | Domain | | Position(s) |
|---|---|---|---|
| InterPro ID | description | Analysis type | on protein |
| IPR001759 | Pentaxin | HMMPfam | 25-66 |
| IPR001759 | Pentaxin | BlastProDom | 19-66 |

[1311] Variant protein HSCREACT_PEA_{—}1_P10 (SEQ ID NO:318) is encoded by the following transcript(s): HSCREACT_PEA_{—}1_T13 (SEQ ID NO:252). The coding portion of transcript HSCREACT_PEA_{—}1_T13 (SEQ ID NO:252) starts at position 117 and ends at position 314. The transcript also has the following SNPs as listed in Table 105 (given according to their position on the nucleotide sequence, with the alternative nucleic acid listed; the last column indicates whether the SNP is known or not; the presence of known SNPs in variant protein HSCREACT_PEA_{—}1_P10 (SEQ ID NO:318) sequence provides support for the deduced sequence of this variant protein according to the present invention).

TABLE 105
Nucleic acid SNPs

| SNP position on nucleotide | Alternative | Previously |
|---|---|---|
| sequence | nucleic acid | known SNP? |
| 11 | G -> C | Yes |
| 11 | G -> T | Yes |
| 90 | T -> | No |
| 90 | T -> C | No |
| 129 | T -> | No |
| 164 | T -> | No |
| 194 | T -> | No |
| 321 | T -> C | No |
| 424 | C -> | No |
| 424 | C -> G | No |
| 531 | C -> T | Yes |
| 645 | C -> A | Yes |
| 653 | C -> T | Yes |
| 895 | C -> A | Yes |
| 897 | C -> T | No |
| 1143 | T -> | No |
| 1216 | T -> C | Yes |
| 1237 | C -> T | Yes |
| 1314 | T -> C | Yes |
| 1319 | C -> T | Yes |
| 1322 | C -> T | Yes |
| 1338 | C -> T | Yes |
| 1430 | C -> T | Yes |
| 1502 | A -> T | Yes |
| 1511 | G -> A | Yes |

[1312] Variant protein HSCREACT_PEA_{—}1_P12 (SEQ ID NO:319) according to the present invention has an amino acid sequence; it is encoded by transcript(s) HSCREACT_PEA_{—}1_T15 (SEQ ID NO:253). An alignment is given to the known protein (C-reactive protein precursor (SEQ ID NO:316)) at the end of the application. One or more alignments to one or more previously published protein sequences are given in the alignment table located on the attached CDROM. A brief description of the relationship of the variant protein according to the present invention to each such aligned protein is as follows:

[1313] Comparison report between HSCREACT_PEA_{—}1_P12 (SEQ ID NO:319) and CRP_HUMAN (SEQ ID NO:316):

[1314] 1. An isolated chimeric polypeptide encoding for HSCREACT_PEA_{—}1_P12 (SEQ ID NO:319), comprising a first amino acid sequence being at least 90% homologous to MEKLLCFLVLTSLSHAFGQTDMSRKAFVFPKESDTSYVSLKAPLTKPLKAFTVCLHFYTELSSTRG corresponding to amino acids 1-66 of CRP_HUMAN (SEQ ID NO:316), which also corresponds to amino acids 1-66 of HSCREACT_PEA_{—}1_P12 (SEQ ID NO:319), and a second amino acid sequence being at least 90% homologous to PNVLNWRALKYEVQGEVFTKPQLWP corresponding to amino acids 200-224 of CRP_HUMAN (SEQ ID NO:316), which also corresponds to amino acids 67-91 of HSCREACT_PEA_{—}1_P12 (SEQ ID NO:319), wherein said first amino acid sequence and second amino acid sequence are contiguous and in a sequential order.

[1315] 2. An isolated chimeric polypeptide encoding for an edge portion of HSCREACT_PEA_{—}1_P12 (SEQ ID NO:319), comprising a polypeptide having a length “n”, wherein n is at least about 10 amino acids in length, optionally at least about 20 amino acids in length, preferably at least about 30 amino acids in length, more preferably at least about 40 amino acids in length and most preferably at least about 50 amino acids in length, wherein at least two amino acids comprise GP, having a structure as follows: a sequence starting from any of amino acid numbers 66−x to 66; and ending at any of amino acid numbers 67+((n−2)−x), in which x varies from 0 to n−2.

[1316] The location of the variant protein was determined according to results from a number of different software programs and analyses, including analyses from SignalP and other specialized programs. The variant protein is believed to be located as follows with regard to the cell: secreted. The protein localization is believed to be secreted because both signal-peptide prediction programs predict that this protein has a signal peptide, and neither trans-membrane region prediction program predicts that this protein has a trans-membrane region.

[1317] The phosphorylation sites of variant protein HSCREACT_PEA_{—}1_P12 (SEQ ID NO:319), as compared to the known protein C-reactive protein precursor (SEQ ID NO:316), are described in Table 106 (given according to their position(s) on the amino acid sequence in the first column; the second column indicates whether the phosphorylation site is present in the variant protein; and the last column indicates whether the position is different on the variant protein).

TABLE 106
Phosphorylation site(s)

| Position(s) on known | Present in | Position in |
|---|---|---|
| amino acid sequence | variant protein? | variant protein? |
| 19 | yes | 19 |

[1318] The variant protein has the following domains, as determined by using InterPro. The domains are described in Table 107:

TABLE 107
InterPro domain(s)

| | Domain | | Position(s) |
|---|---|---|---|
| InterPro ID | description | Analysis type | on protein |
| IPR001759 | Pentaxin | HMMPfam | 25-66, 67-87 |
| IPR001759 | Pentaxin | HMMSmart | 19-91 |
| IPR001759 | Pentaxin | BlastProDom | 19-84 |

[1319] Variant protein HSCREACT_PEA_{—}1_P12 (SEQ ID NO:319) is encoded by the following transcript(s): HSCREACT_PEA_{—}1_T5 (SEQ ID NO:253). The coding portion of transcript HSCREACT_PEA_{—}1_T15 (SEQ ID NO:253) starts at position 117 and ends at position 389. The transcript also has the following SNPs as listed in Table 108 (given according to their position on the nucleotide sequence, with the alternative nucleic acid listed; the last column indicates whether the SNP is known or not; the presence of known SNPs in variant protein HSCREACT_PEA_{—}1_P12 (SEQ ID NO:319) sequence provides support for the deduced sequence of this variant protein according to the present invention).

TABLE 108
Nucleic acid SNPs

| SNP position on | Alternative | Previously |
|---|---|---|
| nucleotide sequence | nucleic acid | known SNP? |
| 11 | G -> C | Yes |
| 11 | G -> T | Yes |
| 90 | T -> | No |
| 90 | T -> C | No |
| 129 | T -> | No |
| 164 | T -> | No |
| 194 | T -> | No |
| 387 | C -> | No |
| 387 | C -> G | No |
| 494 | C -> T | Yes |
| 608 | C -> A | Yes |
| 616 | C -> T | Yes |
| 858 | C -> A | Yes |
| 860 | C -> T | No |
| 1106 | T -> | No |
| 1179 | T -> C | Yes |
| 1200 | C -> T | Yes |
| 1277 | T -> C | Yes |
| 1282 | C -> T | Yes |
| 1285 | C -> T | Yes |
| 1301 | C -> T | Yes |
| 1393 | C -> T | Yes |
| 1465 | A -> T | Yes |
| 1474 | G -> A | Yes |

[1320] Variant protein HSCREACT_PEA_{—}1_P16 (SEQ ID NO:320) according to the present invention has an amino acid sequence; it is encoded by transcript(s) HSCREACT_PEA_{—}1_T22 (SEQ ID NO:254). An alignment is given to the known protein (C-reactive protein precursor (SEQ ID NO:316)) at the end of the application. One or more alignments to one or more previously published protein sequences are given in the alignment table located on the attached CDROM. A brief description of the relationship of the variant protein according to the present invention to each such aligned protein is as follows:

[1321] Comparison report between HSCREACT_PEA_{—}1_P16 (SEQ ID NO:320) and CRP_HUMAN (SEQ ID NO:316):

[1322] 1. An isolated chimeric polypeptide encoding for HSCREACT_PEA_{—}1_P16 (SEQ ID NO:320), comprising a first amino acid sequence being at least 90% homologous to MEKLLCFLVLTSLSHAFGQTDMSRKAFVFPKESDTSYVSLKAPLTKPLKAFTVCLHFYTELSSTRG YSIFSYATKRQDNEILIFWSKDIGYSFTVGGSEILFEVPEVTVAPVHICTSWESASGIVEFWVDGKPR VRKSLKKGYTVGAEASIILGQEQDSF corresponding to amino acids 1-160 of CRP_HUMAN (SEQ ID NO:316), which also corresponds to amino acids 1-160 of HSCREACT_PEA_{—}1_P16 (SEQ ID NO:320), and a second amino acid sequence being at least 70%, optionally at least 80%, preferably at least 85%, more preferably at least 90% and most preferably at least 95% homologous to a polypeptide having the sequence VSESGHWPGVWFGSRVLIIMS (SEQ ID NO: 650) corresponding to amino acids 161-181 of HSCREACT_PEA_{—}1_P16 (SEQ ID NO:320), wherein said first amino acid sequence and second amino acid sequence are contiguous and in a sequential order.

[1323] 2. An isolated polypeptide encoding for a tail of HSCREACT_PEA_{—}1_P16 (SEQ ID NO:320), comprising a polypeptide being at least 70%, optionally at least about 80%, preferably at least about 85%, more preferably at least about 90% and most preferably at least about 95% homologous to the sequence VSESGHWPGVWFGSRVLIIMS (SEQ ID NO: 650) in HSCREACT_PEA_{—}1_P16 (SEQ ID NO:320).

[1324] The location of the variant protein was determined according to results from a number of different software programs and analyses, including analyses from SignalP and other specialized programs. The variant protein is believed to be located as follows with regard to the cell: secreted. The protein localization is believed to be secreted because both signal-peptide prediction programs predict that this protein has a signal peptide, and neither trans-membrane region prediction program predicts that this protein has a trans-membrane region.

[1325] The phosphorylation sites of variant protein HSCREACT_PEA_{—}1_P16 (SEQ ID NO:320), as compared to the known protein C-reactive protein precursor (SEQ ID NO:316), are described in Table 109 (given according to their position(s) on the amino acid sequence in the first column; the second column indicates whether the phosphorylation site is present in the variant protein; and the last column indicates whether the position is different on the variant protein).

TABLE 109
Phosphorylation site(s)

| Position(s) on known | Present in | Position in |
|---|---|---|
| amino acid sequence | variant protein? | variant protein? |
| 19 | yes | 19 |

[1326] The variant protein has the following domains, as determined by using InterPro. The domains are described in Table 110:

TABLE 110
InterPro domain(s)

| | Domain | | |
|---|---|---|---|
| InterPro ID | description | Analysis type | Position(s) on protein |
| IPR001759 | Pentaxin | FPrintScan | 113-131, 139-158, |
| | | | 48-62, 70-84 |
| IPR001759 | Pentaxin | HMMPfam | 25-160 |
| IPR001759 | Pentaxin | HMMSmart | 19-178 |
| IPR001759 | Pentaxin | ScanRegExp | 113-120 |
| IPR001759 | Pentaxin | BlastProDom | 19-160 |

[1327] Variant protein HSCREACT_PEA_{—}1_P16 (SEQ ID NO:320) is encoded by the following transcript(s): HSCREACT_PEA_{—}1_T22 (SEQ ID NO:254). The coding portion of transcript HSCREACT_PEA_{—}1_T22 (SEQ ID NO:254) starts at position 117 and ends at position 659. The transcript also has the following SNPs as listed in Table 111 (given according to their position on the nucleotide sequence, with the alternative nucleic acid listed; the last column indicates whether the SNP is known or not; the presence of known SNPs in variant protein HSCREACT_PEA_{—}1_P16 (SEQ ID NO:320) sequence provides support for the deduced sequence of this variant protein according to the present invention).

TABLE 111
Nucleic acid SNPs

| SNP position on | Alternative | Previously |
|---|---|---|
| nucleotide sequence | nucleic acid | known SNP? |
| 11 | G -> C | Yes |
| 11 | G -> T | Yes |
| 90 | T -> | No |
| 90 | T -> C | No |
| 129 | T -> | No |
| 164 | T -> | No |
| 194 | T -> | No |
| 336 | A -> G | No |
| 366 | T -> | No |
| 517 | G -> | No |
| 599 | C -> A | Yes |
| 601 | C -> T | No |
| 847 | T -> | No |
| 920 | T -> C | Yes |
| 941 | C -> T | Yes |
| 1018 | T -> C | Yes |
| 1023 | C -> T | Yes |
| 1026 | C -> T | Yes |
| 1042 | C -> T | Yes |
| 1134 | C -> T | Yes |
| 1206 | A -> T | Yes |
| 1215 | G -> A | Yes |

[1328] Variant protein HSCREACT_PEA_{—}1_P22 (SEQ ID NO:321) according to the present invention has an amino acid sequence; it is encoded by transcript(s) HSCREACT_PEA_{—}1_T29 (SEQ ID NO:255). An alignment is given to the known protein (C-reactive protein precursor (SEQ ID NO:316)) at the end of the application. One or more alignments to one or more previously published protein sequences are given in the alignment table located on the attached CDROM. A brief description of the relationship of the variant protein according to the present invention to each such aligned protein is as follows:

[1329] Comparison report between HSCREACT_PEA_{—}1_P22 (SEQ ID NO:321) and CRP_HUMAN (SEQ ID NO:316):

[1330] 1. An isolated chimeric polypeptide encoding for HSCREACT_PEA_{—}1_P22 (SEQ ID NO:321), comprising a first amino acid sequence being at least 90% homologous to MEKLLCFLVLTSLSHAFGQTDMSRKAFVFPKESDTSYVSLKAPLTKPLKAFTVCLHFYTELSSTRG corresponding to amino acids 1-66 of CRP_HUMAN (SEQ ID NO:316), which also corresponds to amino acids 1-66 of HSCREACT_PEA_{—}1_P22 (SEQ ID NO:321), and a second amino acid sequence being at least 70%, optionally at least 80%, preferably at least 85%, more preferably at least 90% and most preferably at least 95% homologous to a polypeptide having the sequence AFLILWLFWETPPLFHTNLVGL (SEQ ID NO: 651) corresponding to amino acids 67-88 of HSCREACT_PEA_{—}1_P22 (SEQ ID NO:321), wherein said first amino acid sequence and second amino acid sequence are contiguous and in a sequential order.

[1331] 2. An isolated polypeptide encoding for a tail of HSCREACT_PEA_{—}1_P22 (SEQ ID NO:321), comprising a polypeptide being at least 70%, optionally at least about 80%, preferably at least about 85%, more preferably at least about 90% and most preferably at least about 95% homologous to the sequence AFLILWLFWETPPLFHTNLVGL (SEQ ID NO: 651) in HSCREACT_PEA_{—}1_P22 (SEQ ID NO:321).

[1332] The location of the variant protein was determined according to results from a number of different software programs and analyses, including analyses from SignalP and other specialized programs. The variant protein is believed to be located as follows with regard to the cell: secreted. The protein localization is believed to be secreted because both signal-peptide prediction programs predict that this protein has a signal peptide, and neither trans-membrane region prediction program predicts that this protein has a trans-membrane region.

[1333] The phosphorylation sites of variant protein HSCREACT_PEA_{—}1_P22 (SEQ ID NO:321), as compared to the known protein C-reactive protein precursor (SEQ ID NO:316), are described in Table 112 (given according to their position(s) on the amino acid sequence in the first column; the second column indicates whether the phosphorylation site is present in the variant protein; and the last column indicates whether the position is different on the variant protein).

TABLE 112
Phosphorylation site(s)

| Position(s) on known amino | Present in | |
|---|---|---|
| acid sequence | variant protein? | Position in variant protein? |
| 19 | yes | 19 |

[1334] The variant protein has the following domains, as determined by using InterPro. The domains are described in Table 113:

TABLE 113
InterPro domain(s)

| | Domain | | |
|---|---|---|---|
| InterPro ID | description | Analysis type | Position(s) on protein |
| IPR001759 | Pentaxin | HMMPfam | 25-66 |
| IPR001759 | Pentaxin | BlastProDom | 19-66 |

[1335] Variant protein HSCREACT_PEA_{—}1_P22 (SEQ ID NO:321) is encoded by the following transcript(s): HSCREACT_PEA_{—}1_T29 (SEQ ID NO:255). The coding portion of transcript HSCREACT_PEA_{—}1_T29 (SEQ ID NO:255) starts at position 117 and ends at position 380. The transcript also has the following SNPs as listed in Table 114 (given according to their position on the nucleotide sequence, with the alternative nucleic acid listed; the last column indicates whether the SNP is known or not; the presence of known SNPs in variant protein HSCREACT_PEA_{—}1_P22 (SEQ ID NO:321) sequence provides support for the deduced sequence of this variant protein according to the present invention).

TABLE 114
Nucleic acid SNPs

| SNP position on nucleotide | Alternative | |
|---|---|---|
| sequence | nucleic acid | Previously known SNP? |
| 11 | G -> C | Yes |
| 11 | G -> T | Yes |
| 90 | T -> | No |
| 90 | T -> C | No |
| 129 | T -> | No |
| 164 | T -> | No |
| 194 | T -> | No |
| 370 | T -> C | Yes |
| 391 | C -> T | Yes |
| 468 | T -> C | Yes |
| 473 | C -> T | Yes |
| 476 | C -> T | Yes |
| 492 | C -> T | Yes |
| 584 | C -> T | Yes |
| 656 | A -> T | Yes |
| 665 | G -> A | Yes |

[1336] variant protein HSCREACT_PEA_{—}1_P2 (SEQ ID NO:322) according to the present invention has an amino acid sequence; it is encoded by transcript(s) HSCREACT_PEA_{—}1_T33 (SEQ ID NO:258). An alignment is given to the known protein (C-reactive protein precursor (SEQ ID NO:316)) at the end of the application. One or more alignments to one or more previously published protein sequences are given in the alignment table located on the attached CDROM. A brief description of the relationship of the variant protein according to the present invention to each such aligned protein is as follows:

[1337] Comparison report between HSCREACT_PEA_{—}1_P28 (SEQ ID NO:322) and CRP_HUMAN (SEQ ID NO:316):

[1338] 1. An isolated chimeric polypeptide encoding for HSCREACT_PEA_{—}1_P28 (SEQ ID NO:322), comprising a first amino acid sequence being at least 90% homologous to MEKLLCFLVLTSLSHAFGQTDMSRKAFVFPKESDTSYVSLKAPLTKPLKAFTVCLHFYTELSST corresponding to amino acids 1-64 of CRP_HUMAN (SEQ ID NO:316), which also corresponds to amino acids 1-64 of HSCREACT_PEA_{—}1_P28 (SEQ ID NO:322), and a second amino acid sequence being at least 70%, optionally at least 80%, preferably at least 85%, more preferably at least 90% and most preferably at least 95% homologous to a polypeptide having the sequence LLS corresponding to amino acids 65-67 of HSCREACT_PEA_{—}1_P28 (SEQ ID NO:322), wherein said first amino acid sequence and second amino acid sequence are contiguous and in a sequential order.

[1339] The location of the variant protein was determined according to results from a number of different software programs and analyses, including analyses from SignalP and other specialized programs. The variant protein is believed to be located as follows with regard to the cell: secreted. The protein localization is believed to be secreted because both signal-peptide prediction programs predict that this protein has a signal peptide, and neither trans-membrane region prediction program predicts that this protein has a trans-membrane region.

[1340] The phosphorylation sites of variant protein HSCREACT_PEA_{—}1_P28 (SEQ ID NO:322), as compared to the known protein C-reactive protein precursor (SEQ ID NO:316), are described in Table 115 (given according to their position(s) on the amino acid sequence in the first column; the second column indicates whether the phosphorylation site is present in the variant protein; and the last column indicates whether the position is different on the variant protein).

TABLE 115
Phosphorylation site(s)

| Position(s) on known amino | Present in | |
|---|---|---|
| acid sequence | variant protein? | Position in variant protein? |
| 19 | yes | 19 |

[1341] The variant protein has the following domains, as determined by using InterPro. The domains are described in Table 116:

TABLE 116
InterPro domain(s)

| | Domain | | |
|---|---|---|---|
| InterPro ID | description | Analysis type | Position(s) on protein |
| IPR001759 | Pentaxin | HMMPfam | 25-64 |
| IPR001759 | Pentaxin | BlastProDom | 19-64 |

[1342] Variant protein HSCREACT_PEA_{—}1_P28 (SEQ ID NO:322) is encoded by the following transcript(s): HSCREACT_PEA_{—}1_T33 (SEQ ID NO:258). The coding portion of transcript HSCREACT_PEA_{—}1_T33 (SEQ ID NO:258) starts at position 117 and ends at position 317. The transcript also has the following SNPs as listed in Table 117 (given according to their position on the nucleotide sequence, with the alternative nucleic acid listed; the last column indicates whether the SNP is known or not; the presence of known SNPs in variant protein HSCREACT_PEA_{—}1_P28 (SEQ ID NO:322) sequence provides support for the deduced sequence of this variant protein according to the present invention).

TABLE 117
Nucleic acid SNPs

| SNP position on nucleotide | Alternative | |
|---|---|---|
| sequence | nucleic acid | Previously known SNP? |
| 11 | G -> C | Yes |
| 11 | G -> T | Yes |
| 90 | T -> | No |
| 90 | T -> C | No |
| 129 | T -> | No |
| 164 | T -> | No |
| 194 | T -> | No |
| 366 | T -> C | Yes |
| 387 | C -> T | Yes |
| 464 | T -> C | Yes |
| 469 | C -> T | Yes |
| 472 | C -> T | Yes |
| 488 | C -> T | Yes |
| 580 | C -> T | Yes |
| 652 | A -> T | Yes |
| 661 | G -> A | Yes |

[1343] Table 118 below describes the starting and ending position of HSCREACT_PEA_{—}1_node_{—}8 (SEQ ID NO:266) on each of the relevant transcripts. Experimental results for this segment are described below.

TABLE 118
Segment location on transcripts

| | Segment | Segment |
|---|---|---|
| | starting | ending |
| Transcript name | position | position |
| HSCREACT_PEA_1_T12 (SEQ ID NO: 251) | 178 | 250 |
| HSCREACT_PEA_1_T13 (SEQ ID NO: 252) | 178 | 250 |
| HSCREACT_PEA_1_T15 (SEQ ID NO: 253) | 178 | 250 |
| HSCREACT_PEA_1_T22 (SEQ ID NO: 254) | 178 | 250 |
| HSCREACT_PEA_1_T29 (SEQ ID NO: 255) | 178 | 250 |
| HSCREACT_PEA_1_T30 (SEQ ID NO: 256) | 178 | 250 |
| HSCREACT_PEA_1_T32 (SEQ ID NO: 257) | 178 | 250 |
| HSCREACT_PEA_1_T33 (SEQ ID NO: 258) | 178 | 250 |
| HSCREACT_PEA_1_T38 (SEQ ID NO: 259) | 178 | 250 |
| HSCREACT_PEA_1_T39 (SEQ ID NO: 260) | 178 | 250 |

[1344] Table 119 below describes the starting and ending position of HSCREACT_PEA_{—}1_node_{—}11 (SEQ ID NO:269) on each of the relevant transcripts. Experimental results for this segment are described below.

TABLE 119
Segment location on transcripts

| | Segment | Segment |
|---|---|---|
| | starting | ending |
| Transcript name | position | position |
| HSCREACT_PEA_1_T12 (SEQ ID NO: 251) | 284 | 309 |
| HSCREACT_PEA_1_T13 (SEQ ID NO: 252) | 284 | 309 |
| HSCREACT_PEA_1_T15 (SEQ ID NO: 253) | 284 | 309 |
| HSCREACT_PEA_1_T22 (SEQ ID NO: 254) | 284 | 309 |
| HSCREACT_PEA_1_T29 (SEQ ID NO: 255) | 284 | 309 |
| HSCREACT_PEA_1_T30 (SEQ ID NO: 256) | 284 | 309 |
| HSCREACT_PEA_1_T32 (SEQ ID NO: 257) | 284 | 309 |
| HSCREACT_PEA_1_T33 (SEQ ID NO: 258) | 284 | 309 |
| HSCREACT_PEA_1_T38 (SEQ ID NO: 259) | 284 | 309 |
| HSCREACT_PEA_1_T39 (SEQ ID NO: 260) | 284 | 309 |

Expression of Homo sapiens C-reactive protein, pentraxin-related (CRP) HSCREACT transcripts which are detectable by amplicon as depicted in sequence name HSCREACT junc11-53F2R2 (SEQ ID NO:325) in different normal tissues:

[1345] Expression of Homo sapiens C-reactive protein, pentraxin-related (CRP) transcripts detectable by or according to HSCREACT junc11-53F2R2 (SEQ ID NO:325) amplicon and primers HSCREACT junc11-53F2 (SEQ ID NO: 323) and HSCREACT junc11-53R2 (SEQ ID NO: 324) was measured by real time PCR. In parallel the expression of four housekeeping genes—RPL19 (GenBank Accession No. NM_{—}000981 (SEQ ID NO:7); RPL19 amplicon (SEQ ID NO: 38)), TATA box (GenBank Accession No. NM_{—}003194 (SEQ ID NO:2); TATA amplicon (SEQ ID NO: 53)), Ubiquitin (GenBank Accession No. BC000449 (SEQ ID NO:9); amplicon—Ubiquitin-amplicon (SEQ ID NO:50)) and SDHA (GenBank Accession No. NM_{—}004168 (SEQ ID NO:4); amplicon—SDHA-amplicon (SEQ ID NO:29)) was measured similarly. For each RT sample, the expression of the above amplicon was normalized to the geometric mean of the quantities of the housekeeping genes. The normalized quantity of each RT sample was then divided by the median of the quantities of the liver samples (Sample Nos. 47-49 Table 7, “Tissue samples in normal panel”), to obtain a value of relative expression of each sample relative to median of the liver samples. These data are plotted in FIGS. 29a and 29b in two different scales.

| | |
|---|---|
| HSCREACT junc11-53F2 Forward primer: | (SEQ ID NO: 323) |
| AACTGTCCTCGACCCTGCTTT | |
| HSCREACT junc11-53R2 Reverse primer: | (SEQ ID NO: 324) |
| GTGGCCTGGGTATATTGGGA | |
| Amplicon: | |

AACTGTCCTCGACCCTGCTTTCTTAATTTTATGGCTCTTCTGGGAAACTCCTCCCCTTTTCCACA
CGAACCTTGTGGGGCTGTGAATTCTTTCTTCATCCCCGCATTCCCAATATACCCAGGCCAC

Expression of Homo sapiens C-reactive protein, pentraxin-related (CRP) HSCREACT transcripts which are detectable by amplicon as depicted in sequence name HSCREACT junc12-30F2R2 (SEQ ID NO:328) in different normal tissues
Expression of Homo sapiens C-reactive protein, pentraxin-related (CRP) transcripts detectable by or according to HSCREACT junc12-30F2R2 (SEQ ID NO:328) amplicon and primers HSCREACT junc12-30F2 (SEQ ID NO: 326) and HSCREACT junc12-30R2 (SEQ ID NO: 327) was measured by real time PCR. In parallel the expression of four housekeeping genes—RPL19 (GenBank Accession No. NM_{—}000981 (SEQ ID NO:7); RPL19 amplicon (SEQ ID NO: 38)), TATA box (GenBank Accession No. NM_{—}003194 (SEQ ID NO:2); TATA amplicon (SEQ ID NO: 53)), Ubiquitin (GenBank Accession No. BC000449 (SEQ ID NO:9); amplicon—Ubiquitin-amplicon (SEQ ID NO:50)) and SDHA (GenBank Accession No. NM_{—}004168 (SEQ ID NO:4); amplicon—SDHA-amplicon (SEQ ID NO:29)) was measured similarly. For each RT sample, the expression of the above amplicon was normalized to the geometric mean of the quantities of the housekeeping genes. The normalized quantity of each RT sample was then divided by the median of the quantities of the liver samples (Sample Nos. 47-49, Table 7, “Tissue samples in normal panel”), to obtain a value of relative expression of each sample relative to median of the liver samples. These data are plotted in FIGS. 30a and 30b below in two different scales.

| | |
|---|---|
| Forward primer HSCREACT junc12-30F2: | (SEQ ID NO: 326) |
| CTCGACCCGTGGATGAGATT | |
| Reverse primer HSCREACT junc12-30R2: | (SEQ ID NO: 327) |
| ACACTTCGCCTTGCACTTCA | |
| Amplicon: | |

CTCGACCCGTGGATGAGATTAACACCATCTATCTTGGCGGGCCCTTCAGTCCTAATGTCCTGA
ACTGGCGGGCACTGAAGTATGAAGTGCAAGGCGAAGTGT

Expression of Homo sapiens C-reactive protein, pentraxin-related (CRP) HSCREACT transcripts which are detectable by amplicon as depicted in sequence name HSCREACT junc12-53F2R2 (SEQ ID NO:331) in different normal tissues:

[1346] Expression of Homo sapiens C-reactive protein, pentraxin-related (CRP) transcripts detectable by or according to HSCREACT junc12-53F2R2 (SEQ ID NO:331) amplicon and primers HSCREACT junc12-53F2 (SEQ ID NO: 329) and HSCREACT junc12-53R2 (SEQ ID NO: 330) was measured by real time PCR. In parallel the expression of four housekeeping genes—RPL19 (GenBank Accession No. NM_{—}000981 (SEQ ID NO:7); RPL19 amplicon (SEQ ID NO: 38)), TATA box (GenBank Accession No. NM_{—}003194 (SEQ ID NO:2); TATA amplicon (SEQ ID NO: 53)), Ubiquitin (GenBank Accession No. BC000449 (SEQ ID NO:9); amplicon—Ubiquitin-amplicon (SEQ ID NO:50)) and SDHA (GenBank Accession No. NM_{—}004168 (SEQ ID NO:4); amplicon—SDHA-amplicon (SEQ ID NO:29)) was measured similarly. For each RT sample, the expression of the above amplicon was normalized to the geometric mean of the quantities of the housekeeping genes. The normalized quantity of each RT sample was then divided by the median of the quantities of the liver samples (Sample Nos. 47-49 Table 7, “Tissue samples in normal panel”), to obtain a value of relative expression of each sample relative to median of the liver samples. These data are plotted in FIGS. 31a and 31b below, in two different scales.

| | |
|---|---|
| Forward primer HSCREACT junc12-53F2: | (SEQ ID NO: 329) |
| CCTCGACCCGTGGTGCT | |
| Reverse primer HSCREACT junc12-53R2: | (SEQ ID NO: 330) |
| GTGGCCTGGGTATATTGGGA | |
| Amplicon: | |

CCTCGACCCGTGGTGCTTTCTTAATTTTATGGCTCTTCTGGGAAACTCCTCCCCTTTTCCACACG
AACCTTGTGGGGCTGTGAATTCTTTCTTCATCCCCGCATTCCCAATATACCCAGGCCAC

Expression of Homo sapiens C-reactive protein, pentraxin-related (CRP) HSCREACT transcripts which are detectable by amplicon as depicted in sequence name HSCREACT junc24-47F2R2 (SEQ ID NO:334) in different normal tissues:
Expression of Homo sapiens C-reactive protein, pentraxin-related (CRP) transcripts detectable by or according to HSCREACT junc24-47F2R2 (SEQ ID NO:334) amplicon and primers HSCREACT junc24-47F2 (SEQ ID NO: 332) and HSCREACT junc24-47R2 (SEQ ID NO: 333) was measured by real time PCR. In parallel the expression of four housekeeping genes—RPL19 (GenBank Accession No. NM_{—}000981 (SEQ ID NO:7); RPL19 amplicon (SEQ ID NO: 38)), TATA box (GenBank Accession No. NM_{—}003194 (SEQ ID NO:2); TATA amplicon (SEQ ID NO: 53)), Ubiquitin (GenBank Accession No. BC000449 (SEQ ID NO:9); amplicon—Ubiquitin-amplicon (SEQ ID NO:50)) and SDHA (GenBank Accession No. NM_{—}004168 (SEQ ID NO:4); amplicon—SDHA-amplicon (SEQ ID NO:29)) was measured similarly. For each RT sample, the expression of the above amplicon was normalized to the geometric mean of the quantities of the housekeeping genes. The normalized quantity of each RT sample was then divided by the quantity of the one liver sample that express this amplicon (Sample No. 47 Table 7, “Tissue samples in normal panel”), to obtain a value of relative expression of each sample relative to this liver sample. These data are plotted in FIG. 32.

| | |
|---|---|
| Forward primer HSCREACT junc24-47F2: | (SEQ ID NO: 332) |
| GCAGGATTCCTTCGTCTCAGA | |
| Reverse primer HSCREACT junc24-47R2: | (SEQ ID NO: 333) |
| GAGAAAGTGGAGGGACTGCG | |
| Amplicon: | |

GCAGGATTCCTTCGTCTCAGAATCAGGACACTGGCCAGGTGTCTGGTTTGGGTCCAGAGTGCT
CATCATCATGTCATAGAACTGCTGGGCCCAGGTCTCCTGAAATGGGAAGCCCAGCAATACCAC
GCAGTCCCTCCACTTTCTC

Expression of Homo sapiens C-reactive protein, pentraxin-related (CRP) HSCREACT transcripts which are detectable by amplicon as depicted in sequence name HSCREACT seg8-11 (SEQ ID NO: 337) in different normal tissues:

[1347] Expression of Homo sapiens C-reactive protein, pentraxin-related (CRP) transcripts detectable by or according to HSCREACT seg8-11 (SEQ ID NO: 337) amplicon and primers HSCREACT seg8-11F (SEQ ID NO: 335) and HSCREACT seg8-11R (SEQ ID NO: 336) was measured by real time PCR. In parallel the expression of four housekeeping genes—RPL19 (GenBank Accession No. NM_{—}000981 (SEQ ID NO:7); RPL19 amplicon (SEQ ID NO: 38)), TATA box (GenBank Accession No. NM_{—}003194 (SEQ ID NO:2); TATA amplicon (SEQ ID NO: 53)), Ubiquitin (GenBank Accession No. BC000449 (SEQ ID NO:9); amplicon—Ubiquitin-amplicon (SEQ ID NO:50)) and SDHA (GenBank Accession No. NM_{—}004168 (SEQ ID NO:4); amplicon—SDHA-amplicon (SEQ ID NO:29)) was measured similarly. For each RT sample, the expression of the above amplicon was normalized to the geometric mean of the quantities of the housekeeping genes. The normalized quantity of each RT sample was then divided by the median of the quantities of the liver samples (Sample Nos. 47-49 Table 7, “Tissue samples in normal panel”), to obtain a value of relative expression of each sample relative to median of the liver samples. These data are plotted in FIG. 33.

| | |
|---|---|
| Forward primer HSCREACT seg8-11F: | (SEQ ID NO: 335) |
| GAAGGCTTTTGTGTTTCCCAAA | |
| Reverse primer HSCREACT seg8-11R: | (SEQ ID NO: 336) |
| AGAAGTGGAGGCACACAGTGAA | |
| Amplicon: | (SEQ ID NO: 337) |

GAAGGCTTTTGTGTTTCCCAAAGAGTCGGATACTTCCTATGTATCCCTCAAAGCACCGTTAACG
AAGCCTCTCAAAGCCTTCACTGTGTGCCTCCACTTCT

### Description for Cluster HSSTROL3

[1348] Cluster HSSTROL3 features 8 transcript(s) and 17 segment(s) of interest, the names for which are given in Tables 120 and 121. The selected protein variants are given in table 122.

TABLE 120
Transcripts of interest
Transcript Name

HSSTROL3_PEA_1_T2 (SEQ ID NO: 338)
HSSTROL3_PEA_1_T5 (SEQ ID NO: 339)
HSSTROL3_PEA_1_T6 (SEQ ID NO: 340)
HSSTROL3_PEA_1_T8 (SEQ ID NO: 341)
HSSTROL3_PEA_1_T9 (SEQ ID NO: 342)
HSSTROL3_PEA_1_T10 (SEQ ID NO: 343)
HSSTROL3_PEA_1_T11 (SEQ ID NO: 344)
HSSTROL3_PEA_1_T12 (SEQ ID NO: 345)

TABLE 121
Segments of interest

| Segment Name | |
|---|---|
| HSSTROL3_PEA_1_node_6 (SEQ ID NO: 346) | HSSTROL3_PEA_1_T2 (SEQ ID NO: 338), |
| | HSSTROL3_PEA_1_T5 (SEQ ID NO: 339), |
| | HSSTROL3_PEA_1_T6 (SEQ ID NO: 340), |
| | HSSTROL3_PEA_1_T8 (SEQ ID NO: 341), |
| | HSSTROL3_PEA_1_T9 (SEQ ID NO: 342), |
| | HSSTROL3_PEA_1_T10 (SEQ ID NO: 343), |
| | HSSTROL3_PEA_1_T11 (SEQ ID NO: 344) |
| | and HSSTROL3_PEA_1_T12 (SEQ ID |
| | NO: 345) |
| HSSTROL3_PEA_1_node_10 (SEQ ID NO: 347) | HSSTROL3_PEA_1_T2 (SEQ ID NO: 338), |
| | HSSTROL3_PEA_1_T5 (SEQ ID NO: 339), |
| | HSSTROL3_PEA_1_T6 (SEQ ID NO: 340), |
| | HSSTROL3_PEA_1_T8 (SEQ ID NO: 341), |
| | HSSTROL3_PEA_1_T9 (SEQ ID NO: 342), |
| | HSSTROL3_PEA_1_T10 (SEQ ID NO: 343), |
| | HSSTROL3_PEA_1_T11 (SEQ ID NO: 344) |
| | and HSSTROL3_PEA_1_T12 (SEQ ID |
| | NO: 345) |
| HSSTROL3_PEA_1_node_12 (SEQ ID NO: 348) | HSSTROL3_PEA_1_T2 (SEQ ID NO: 338) |
| HSSTROL3_PEA_1_node_13 (SEQ ID NO: 349) | HSSTROL3_PEA_1_T2 (SEQ ID NO: 338), |
| | HSSTROL3_PEA_1_T5 (SEQ ID NO: 339), |
| | HSSTROL3_PEA_1_T6 (SEQ ID NO: 340), |
| | HSSTROL3_PEA_1_T8 (SEQ ID NO: 341), |
| | HSSTROL3_PEA_1_T9 (SEQ ID NO: 342), |
| | HSSTROL3_PEA_1_T10 (SEQ ID NO: 343), |
| | HSSTROL3_PEA_1_T11 (SEQ ID NO: 344) |
| | and HSSTROL3_PEA_1_T12 (SEQ ID |
| | NO: 345) |
| HSSTROL3_PEA_1_node_15 (SEQ ID NO: 350) | HSSTROL3_PEA_1_T2 (SEQ ID NO: 338), |
| | HSSTROL3_PEA_1_T5 (SEQ ID NO: 339), |
| | HSSTROL3_PEA_1_T6 (SEQ ID NO: 340), |
| | HSSTROL3_PEA_1_T8 (SEQ ID NO: 341), |
| | HSSTROL3_PEA_1_T9 (SEQ ID NO: 342), |
| | HSSTROL3_PEA_1_T10 (SEQ ID NO: 343), |
| | HSSTROL3_PEA_1_T11 (SEQ ID NO: 344) |
| | and HSSTROL3_PEA_1_T12 (SEQ ID |
| | NO: 345) |
| HSSTROL3_PEA_1_node_19 (SEQ ID NO: 351) | HSSTROL3_PEA_1_T2 (SEQ ID NO: 338), |
| | HSSTROL3_PEA_1_T5 (SEQ ID NO: 339), |
| | HSSTROL3_PEA_1_T6 (SEQ ID NO: 340), |
| | HSSTROL3_PEA_1_T8 (SEQ ID NO: 341), |
| | HSSTROL3_PEA_1_T9 (SEQ ID NO: 342), |
| | HSSTROL3_PEA_1_T10 (SEQ ID NO: 343), |
| | HSSTROL3_PEA_1_T11 (SEQ ID NO: 344) |
| | and HSSTROL3_PEA_1_T12 (SEQ ID |
| | NO: 345) |
| HSSTROL3_PEA_1_node_21 (SEQ ID NO: 352) | HSSTROL3_PEA_1_T2 (SEQ ID NO: 338), |
| | HSSTROL3_PEA_1_T5 (SEQ ID NO: 339), |
| | HSSTROL3_PEA_1_T6 (SEQ ID NO: 340), |
| | HSSTROL3_PEA_1_T8 (SEQ ID NO: 341), |
| | HSSTROL3_PEA_1_T9 (SEQ ID NO: 342), |
| | HSSTROL3_PEA_1_T10 (SEQ ID NO: 343), |
| | HSSTROL3_PEA_1_T11 (SEQ ID NO: 344) |
| | and HSSTROL3_PEA_1_T12 (SEQ ID |
| | NO: 345) |
| HSSTROL3_PEA_1_node_24 (SEQ ID NO: 353) | HSSTROL3_PEA_1_T6 (SEQ ID NO: 340), |
| | HSSTROL3_PEA_1_T8 (SEQ ID NO: 341) |
| | and HSSTROL3_PEA_1_T9 (SEQ ID |
| | NO: 342) |
| HSSTROL3_PEA_1_node_25 (SEQ ID NO: 354) | HSSTROL3_PEA_1_T6 (SEQ ID NO: 340) |
| | and HSSTROL3_PEA_1_T8 (SEQ ID |
| | NO: 341) |
| HSSTROL3_PEA_1_node_26 (SEQ ID NO: 355) | HSSTROL3_PEA_1_T2 (SEQ ID NO: 338), |
| | HSSTROL3_PEA_1_T5 (SEQ ID NO: 339), |
| | HSSTROL3_PEA_1_T6 (SEQ ID NO: 340), |
| | HSSTROL3_PEA_1_T8 (SEQ ID NO: 341), |
| | HSSTROL3_PEA_1_T9 (SEQ ID NO: 342) |
| | and HSSTROL3_PEA_1_T11 (SEQ ID |
| | NO: 344) |
| HSSTROL3_PEA_1_node_28 (SEQ ID NO: 356) | HSSTROL3_PEA_1_T5 (SEQ ID NO: 339), |
| | HSSTROL3_PEA_1_T6 (SEQ ID NO: 340), |
| | HSSTROL3_PEA_1_T9 (SEQ ID NO: 342) |
| | and HSSTROL3_PEA_1_T10 (SEQ ID |
| | NO: 343) |
| HSSTROL3_PEA_1_node_29 (SEQ ID NO: 357) | HSSTROL3_PEA_1_T2 (SEQ ID NO: 338), |
| | HSSTROL3_PEA_1_T5 (SEQ ID NO: 339), |
| | HSSTROL3_PEA_1_T6 (SEQ ID NO: 340), |
| | HSSTROL3_PEA_1_T8 (SEQ ID NO: 341), |
| | HSSTROL3_PEA_1_T9 (SEQ ID NO: 342), |
| | HSSTROL3_PEA_1_T10 (SEQ ID NO: 343), |
| | HSSTROL3_PEA_1_T11 (SEQ ID NO: 344) |
| | and HSSTROL3_PEA_1_T12 (SEQ ID |
| | NO: 345) |
| HSSTROL3_PEA_1_node_11 (SEQ ID NO: 358) | HSSTROL3_PEA_1_T2 (SEQ ID NO: 338), |
| | HSSTROL3_PEA_1_T5 (SEQ ID NO: 339), |
| | HSSTROL3_PEA_1_T6 (SEQ ID NO: 340), |
| | HSSTROL3_PEA_1_T8 (SEQ ID NO: 341), |
| | HSSTROL3_PEA_1_T9 (SEQ ID NO: 342), |
| | HSSTROL3_PEA_1_T10 (SEQ ID NO: 343) |
| | and HSSTROL3_PEA_1_T11 (SEQ ID |
| | NO: 344) |
| HSSTROL3_PEA_1_node_17 (SEQ ID NO: 359) | HSSTROL3_PEA_1_T2 (SEQ ID NO: 338), |
| | HSSTROL3_PEA_1_T5 (SEQ ID NO: 339), |
| | HSSTROL3_PEA_1_T6 (SEQ ID NO: 340), |
| | HSSTROL3_PEA_1_T8 (SEQ ID NO: 341), |
| | HSSTROL3_PEA_1_T9 (SEQ ID NO: 342), |
| | HSSTROL3_PEA_1_T10 (SEQ ID NO: 343), |
| | HSSTROL3_PEA_1_T11 (SEQ ID NO: 344) |
| | and HSSTROL3_PEA_1_T12 (SEQ ID |
| | NO: 345) |
| HSSTROL3_PEA_1_node_18 (SEQ ID NO: 360) | HSSTROL3_PEA_1_T5 (SEQ ID NO: 339), |
| | HSSTROL3_PEA_1_T6 (SEQ ID NO: 340), |
| | HSSTROL3_PEA_1_T8 (SEQ ID NO: 341), |
| | HSSTROL3_PEA_1_T9 (SEQ ID NO: 342), |
| | HSSTROL3_PEA_1_T10 (SEQ ID NO: 343), |
| | HSSTROL3_PEA_1_T11 (SEQ ID NO: 344) |
| HSSTROL3_PEA_1_node_20 (SEQ ID NO: 361) | HSSTROL3_PEA_1_T11 (SEQ ID NO: 344) |
| HSSTROL3_PEA_1_node_27 (SEQ ID NO: 362) | HSSTROL3_PEA_1_T2 (SEQ ID NO: 338), |
| | HSSTROL3_PEA_1_T5 (SEQ ID NO: 339), |
| | HSSTROL3_PEA_1_T6 (SEQ ID NO: 340), |
| | HSSTROL3_PEA_1_T8 (SEQ ID NO: 341), |
| | HSSTROL3_PEA_1_T9 (SEQ ID NO: 342), |
| | HSSTROL3_PEA_1_T10 (SEQ ID NO: 343), |
| | HSSTROL3_PEA_1_T11 (SEQ ID NO: 344) |
| | and HSSTROL3_PEA_1_T12 (SEQ ID |
| | NO: 345) |

TABLE 122
Proteins of interest

| Protein Name | Corresponding Transcript(s) |
|---|---|
| HSSTROL3_PEA_1_P4 | HSSTROL3_PEA_1_T5 |
| (SEQ ID NO: 364) | (SEQ ID NO: 339) |
| HSSTROL3_PEA_1_P5 | HSSTROL3_PEA_1_T6 |
| (SEQ ID NO: 365) | (SEQ ID NO: 340); |
| | HSSTROL3_PEA_1_T8 |
| | (SEQ ID NO: 341); |
| | HSSTROL3_PEA_1_T9 |
| | (SEQ ID NO: 342) |
| HSSTROL3_PEA_1_P7 | HSSTROL3_PEA_1_T10 |
| (SEQ ID NO: 366) | (SEQ ID NO: 343) |
| HSSTROL3_PEA_1_P8 | HSSTROL3_PEA_1_T11 |
| (SEQ ID NO: 367) | (SEQ ID NO: 344) |
| HSSTROL3_PEA_1_P9 | HSSTROL3_PEA_1_T12 |
| (SEQ ID NO: 368) | (SEQ ID NO: 345) |
| HSSTROL3_PEA_1_P11 | HSSTROL3_PEA_1_T2 |
| (SEQ ID NO: 369) | (SEQ ID NO: 338) |

[1349] These sequences are variants of the known protein Stromelysin-3 precursor (SEQ ID NO:363) (SwissProt accession identifier MMP11_HUMAN (SEQ ID NO:363); known also according to the synonyms EC 3.4.24.-; Matrix metalloproteinase-11; MMP-11; ST3; SL-3), referred to herein as the previously known protein.

[1350] Protein Stromelysin-3 precursor (SEQ ID NO:363) is known or believed to have the following function(s): May play an important role in the progression of epithelial malignancies.

[1351] The following GO Annotation(s) apply to the previously known protein. The following annotation(s) were found: proteolysis and peptidolysis; developmental processes; morphogenesis, which are annotation(s) related to Biological Process; stromelysin 3; calcium binding; zinc binding; hydrolase, which are annotation(s) related to Molecular Function; and extracellular matrix, which are annotation(s) related to Cellular Component.

[1352] The GO assignment relies on information from one or more of the SwissProt/TremBl Protein knowledgebase, available from <http://www.expasy.ch/sprot/>; or Locuslink, available from <http://www.ncbi.nlm.nih.gov/projects/LocusLink/>.

[1353] According to optional but preferred embodiments of the present invention, variants of this cluster according to the present invention (amino acid and/or nucleic acid sequences of HSSTROL3) may optionally have one or more of the following utilities, as described with regard to the Table 123 below. It should be noted that these utilities are optionally and preferably suitable for human and non-human animals as subjects, except where otherwise noted. The reasoning is described with regard to biological and/or physiological and/or other information about the known protein, but is given to demonstrate particular diagnostic utility for the variants according to the present invention.

TABLE 123
Utilities for Variants of HSSTROL3

| Diagnostic entity | Rationale | Reference |
|---|---|---|
| Identification of | Successful identification of two year old menstrual | Ferri et al., |
| menstrual blood | bloodstain by using MMP-11 shorter amplicons (forensic | Forensic Sci. |
| stains, for | evaluation of cases with sexual offense) | 2004 |
| example for | | Nov; 49(6): 1387. |
| evaluation of | | |
| forensic evidence | | |
| Marker for | Stromelysin-3 was expressed (immunostained) within the | Perret et al., |
| aggressive | stromal and neoplastic cells of only 1 benign meningioma | Cancer. 2002 |
| meningioma | and 13 atypical meningiomas. The MIB-1 proliferation | Feb |
| | index was significantly higher in the meningiomas | 1; 94(3): 765-72 |
| | expressing ST3 (Student t test: P < 0.001). The invasion of | |
| | bone, muscle, and brain by meningiomas as well the | |
| | recurrence were statistically correlated with their ST3 | |
| | expression (Kruskal-Wallis nonparametric correlation test, P = | |
| | 0.001 and P = 0.008, respectively). | |
| Marker for | MMP-11 strongly immunostained neoplastic gemistocytic | Thorns et al., |
| astrocytoma | astrocytes while oligodendrocytic tumor regions showed | Anticancer Res. |
| (aggressive brain | only a low immunoreaction. | 2003 Sep- |
| tumor) | | Oct; 23(5A): 3937-44 |
| Marker for breast | The MMP-11 gene was originally identified by screening a | Duffy et al., Int |
| cancer | breast cancer cDNA library for genes that were expressed at | J Oncol |
| | higher levels in invasive carcinomas than in breast | 1998; 12: 1343-1348 |
| | fibroadenomas. It rises in stromal (fibroblast) cells adjacent | |
| | to breast carcinoma cells. High levels of stromelysin-3 have | |
| | been found to correlate with poor outcome in patients with | |
| | breast cancer. | |
| Marker for colon | Expressed in invasive colon carcinoma. ST3 expression | Rio et al., J |
| or rectum - | determined by immunohistochemistry was individually | Mammary |
| (colorectal) | related to females, distally located tumors, infiltrative | Gland Biol |
| carcinoma | growth pattern and microsatellite stability. No relationship | Neoplasia. |
| | was found with age, Dukes' stage, differentiation and | 1996 |
| | survival. | Apr; 1(2): 231-40 |
| | | Skoglund et al. |
| | | Oncology. |
| | | 2004; 67(1): 67-72 |
| Marker for | Genes up-regulated (cDNA microarrays) in endometrioid | Moreno-Bueno |
| endometrioid | carcinoma included genes known to be hormonally | et al., Cancer |
| carcinoma | regulated during the menstrual cycle and to be important in | Res. 2003 Sep |
| | endometrial homeostasis, such as MGB2, LTF, END1, and | 15; 63(18): 5697-702 |
| | MMP11. | |
| Marker for | Kaplan-Meier survival analysis showed that patients with | Sharma et al., |
| esophageal | ST-3-positive and TIMP-2-negative esophageal carcinoma | Oncology. |
| carcinoma | (immunohistochemical analysis) had a significantly shorter | 2004; 67(3-4): |
| | disease-free survival (median disease-free survival time of 4 | 300-9 |
| | months) as compared to patients in the other groups (median | |
| | disease-free survival time of 20 months; p = 0.0016) | |
| Marker for gastric | MMP11 is highly expressed in primary tumor of gastric | Deng et al., |
| cancer | cancer (RNA) | Biochem |
| | | Biophys Res |
| | | Commun. 2005 |
| | | Jan |
| | | 14; 326(2): 274-81 |
| Marker for head | Expressed in invasive head and neck carcinoma; | Rio et al., J |
| and neck | Matrix metalloproteinase 11, v-Ral, and integrin beta(4) | Mammary |
| carcinoma | were highly expressed in tumor cells of EBV-associated | Gland Biol |
| | nasopharyngeal carcinomas (mRNA microarray); | Neoplasia. |
| | Significantly higher MMP-11 levels were found in | 1996 |
| | squamous cell carcinoma tumors vs specimens of matched | Apr; 1(2): 231-40; |
| | normal mucosa. | Sriuranpong et |
| | | al., Clin Cancer |
| | | Res. 2004 Aug |
| | | 1; 10(15): 4944-58; |
| | | O- |
| | | Charoenrat et |
| | | al., Arch |
| | | Otolaryngol |
| | | Head Neck |
| | | Surg. 2001 |
| | | Jul; 127(7): 813-20 |
| Marker for non- | Overexpression (Northern blot) level of stromelysin 3 is | Delebecq et al., |
| small cell lung | related to the lymph node involvement in non-small cell | Clin Cancer |
| carcinoma | lung cancer. | Res. 2000 |
| | | Mar; 6(3): 1086-92 |
| Marker for | MMP-11 was up-regulated in osteoarthritis chondrocytes | Aigner et al., |
| osteoarthritis | and, interestingly, also in the early-stage samples. | Arthritis |
| | | Rheum. 2001 |
| | | Dec; 44(12): 2777-89 |
| Marker for | A significantly higher percentage of ovarian carcinomas | Mueller et al., |
| ovarian | than low malignant potential tumours expressed | Virchows Arch. |
| carcinoma | (immunohistochemistry, in situ hybridization) ST-3 in the | 2000 |
| | stroma adjacent to the tumour, with a correlation to | Dec; 437(6): 618-24 |
| | increasing tumour stage. | |
| Marker for | MMP-11 was immunohistochemicaly elevated in pancreatic | Jones et al., |
| pancreatic cancer | carcinoma. Real-time RT-PCR analysis showed that | Clin Cancer |
| | increased MMP-11 expression was strongly associated with | Res. 2004 Apr |
| | lymph node involvement (P = 0.0073). | 15; 10(8): 2832-45 |
| Marker for | Known protein was expressed only in thyroid tumor tissue | Wasenius et al., |
| papillary thyroid | when compared to normal thyroid tissue. Positive | Clin Cancer |
| carcinoma | immunohistochemistry in 87% of tumor samples. | Res. 2003 |
| | | Jan; 9(1): 68-75 |
| Marker for renal | Expression of the MMPs was significantly stronger (RT- | Hagemann et |
| cell carcinoma | PCR) in the carcinomas than in non-malignant tissues. High | al., J Cancer. |
| | levels were demonstrated particularly in clear cell RCC. | 2001 |
| | Expression in papillary RCCs was significantly lower. | Oct; 37(15): 1839-46 |
| Marker for | Apoptosis-related genes CASP10 and MMP11 were | Leivo et al., |
| salivary duct | overexpressed in salivary duct carcinoma, in accordance | Cancer Genet |
| carcinoma | with the typical tumor necrosis seen in this entity. The array | Cytogenet. |
| | results were validated by RT-PCR and | 2005 Jan |
| | immunohistochemistry. | 5; 156(2): 104-13 |
| Marker for | Immunohistochemical analysis of IGF-II and ST-3 protein | Singer et al., . J |
| sarcoma | expression in sarcomas confirmed abundant expression. | Clin |
| | | Endocrinol |
| | | Metab. 1997 |
| | | Jun; 82(6): 1917-22 |
| Marker for skin | Immunoreactivity was positive for ST-3 in fibroblastic cells | Thewes et al., |
| cancers: basal cell | surrounding morphealike basal cell carcinoma cells in 34 | Thewes |
| carcinoma | (68%) of 50 cases, whereas the epithelial tumor cells | |
| | themselves were negative. In none of the 12 cases of | |
| | desmoplastic trichoepithelioma was expression of ST-3 in | |
| | fibroblasts observed. | |
| Marker for skin | ST3 immunostained cells were observed in all cases of | Cribier et al., J |
| cancers: | dermatofibromas (100%), including the 10 giant cases, but | Am Acad |
| differential | never in dermatofibrosarcoma protuberans (0%). | Dermatol. 2002 |
| diagnosis of skin | | Mar; 46(3): 408-13 |
| fibrous tumors | | |
| Marker for skin | Stromelysin-3 was immunohistochemicaly expressed only | Asch et al., Am J |
| cancers: | by fibroblasts surrounding the tumors and not by epithelial | Dermatopathol. |
| squamous cell | cells. The proportion of tumors positively stained was 22% | 1999 |
| carcinoma (SCC) | of keratoacanthoma, 47% of randomly selected SCC, and | Apr; 21(2): 146-50 |
| and | 70% of metastatic SCC | |
| keratoacanthoma | | |
| Marker for | Carcinoma-in-situ (pTis) and noninvasive papillary tumor | Mueller et al., |
| urinary bladder | (pTa) of the urinary bladder staining for ST-3 was evaluated. | Virchows Arch. |
| cancer | None of 27 pTis lesions, 4 of 27 pTa tumors, and 41 of 56 | 2000 |
| | (73.2%) invasive carcinomas were positive for ST-3. | Dec; 437(6): 618-24 |
| | Statistically significant associations were found in the | |
| | invasive carcinomas between ST-3 expression and | |
| | lymphatic vessel invasion, an infiltrative invasive pattern, | |
| | and invasion into at least the muscle layer (pT2, 3, 4 v pT1). | |
| | The expression of ST-3 in frankly invasive tumors was | |
| | associated with a more aggressive tumor phenotype. | |
| Marker for | Prominent among the 67 genes overexpressed (by | Tsibris et al., |
| uterine | microarray analysis) in leiomyoma relative to control | Fertil Steril. |
| leiomyoma | myometrium were ... stromelysin-3, and TGFbeta3. | 2002 |
| | | Jul; 78(1): 114-21 |
| Marker for | Human atherosclerotic plaques (n = 7) express stromelysin-3 | Schonbeck et |
| vascular injury | in situ, whereas fatty streaks (n = 5) and normal arterial | al., Exp Med. |
| and/or | specimens (n = 5) contain little or no stromelysin-3. | 1999 Mar |
| atherosclerosis | Stromelysin-3 mRNA and protein colocalized with | 1; 189(5): 843-53 |
| | endothelial cells, smooth muscle cells, and macrophages | |
| | within the lesion. | |

[1354] According to other optional embodiments of the present invention, variants of this cluster according to the present invention (amino acid and/or nucleic acid sequences of HSSTROL3) may optionally have one or more of the following utilities, some of which are related to utilities described above. It should be noted that these utilities are optionally and preferably suitable for human and non-human animals as subjects, except where otherwise noted.

[1355] A non-limiting example of such a utility is diagnosing leiomyoma, especially of the uterus. Use of the known protein for such a utility is described in U.S. Pat. No. 6,583,167, hereby incorporated by reference as if fully set forth herein.

[1356] Another non-limiting example of such a utility is the diagnosis of hyperproliferative disorders such as cancer for example. Use of the known protein for such a utility is described in US Patent Application No. US20040110152, hereby incorporated by reference as if fully set forth herein.

[1357] HSSTROL3 according to the present invention may optionally undergo intergenic splicing with SMARCB1, to create a fusion protein. SMARCB1 encodes a protein which is part of a complex that relieves repressive chromatin structures, allowing the transcriptional machinery to access its targets more effectively. The encoded nuclear protein may also bind to and enhance the DNA joining activity of HIV-1 integrase. This gene has been found to be a tumor suppressor, and mutations in it have been associated with malignant rhabdoid tumors. Deletions of this gene are linked to chronic myeloid leukemia (CML) and multiple rhabdoid tumors, and are conserved in human solid carcinomas.

[1358] Cluster HSSTROL3_PEA_{—}1 belongs to a family of proteins which are known to have at least a certain number of related functions, including but not limited to, MMP24, MMP25, MMP14, MMP16, MMP3, MMP1, MMP10 and all matrix metalloproteinases. These functions are described below; one or more variants of cluster HSSTROL3_PEA_{—}1 may optionally have one or more diagnostic utilities related to these functions.

[1359] Midtrimester amniotic fluid matrix metalloproteinase-8 (MMP-8) levels above the 90th percentile are a marker for subsequent preterm premature rupture of membranes (Am J Obstet Gynecol. 2005 January; 192(1):109-13). Matrix metalloproteinase 1 gene polymorphism is a prognostic predictor of invasive cervical cancer (Gynecol Oncol. 2005 February; 96(2):314-9). Expression of matrix metalloproteinase activity in idiopathic dilated cardiomyopathy showed it to be a marker of cardiac dilatation (Mol Cell Biochem. 2004 September; 264(1-2):183-91). An autoantibody against matrix metalloproteinase-3 was found in patients with systemic sclerosis (Clin Exp Immunol. 2004 November; 138(2):357-63). Serum active matrix metalloproteinase-9 was found in patients with non-small cell lung cancer (Lung Cancer. 2004 November; 46(2):205-13). A combination assay with circulating vascular endothelial growth factor (VEGF)-C, matrix metalloproteinase-9, and VEGF was found to be useful for diagnosing lymph node metastasis in patients with non-small cell lung cancer (Ann Surg Oncol. 2004 October; 11(10):928-33. Epub 2004 Sep. 20).

[1360] There is an association between serum matrix metalloproteinase-3 concentration and the promoter 5A/6A polymorphism in patients with coronary heart disease (Zhongguo Wei Zhong Bing Ji Jiu Yi Xue. 2004 September; 16(9):536-9). MMP-9, TIMP-1, CD-34 and factor-8 were found to be prognostic markers for squamous cell carcinoma of the tongue (Oral Oncol. 2004 ep; 40(8):798-803). There is a relationship between plasma matrix metalloproteinase-9 and clinical cardiovascular risk factors, as well as echocardiographic left ventricular measures (Framingham Heart Study. Circulation. 2004 Jun. 15; 109(23):2850-6. Epub 2004 Jun. 1). There is clinicopathologic significance of plasma matrix metalloproteinase-2 and -9 levels in patients with undifferentiated nasopharyngeal carcinoma (Eur J Surg Oncol. 2004 June; 30(5):560-4). Matrix metalloproteinase-9 was found to be a potential marker for prognosis in head and neck squamous cell carcinoma (Clin Cancer Res. 2004 May 1; 10(9):3110-6).

[1361] Serum matrix metalloproteinase-3 may be useful for detection of systemic sclerosis (Arch Dermatol Res. 2004 June; 296(1):25-9. Epub 2004 Apr. 17). Matrix metalloproteinases-2 and -9 were found in serum, core needle biopsies and tissue specimens of prostate cancer patients (Virchows Arch. 2004 June; 444(6):518-26. Epub 2004 Apr. 16). Matrix metalloproteinases were found in patients with uterine smooth muscle tumors, after an immunohistochemical analysis of MMP-1 and MMP-2 protein expression in leiomyoma, uterine smooth muscle tumor of uncertain malignant potential, and leiomyosarcoma (J Soc Gynecol Investig. 2004 April; 11(3):182-6).; Matrix metalloproteinases 2 and 9 may be used in the determination of invasive potential of pancreatic tumors (Bull Exp Biol Med. 2003 November; 136(5):494-8). The expression of uteroglobin and matrix metalloproteinase-9 genes in endometrial cancer was found to have a relationship to estrogen and progesterone receptor status (Oncol Rep. 2004 February; 11(2):427-33).

[1362] Table 124 below describes diagnostic utilities for the cluster HSSTROL3 that were found through microarrays, including the statistical significance thereof and a reference. One or more HSSTROL3 variants according to the present invention may optionally have one or more of these utilities.

TABLE 124

| | Statistical | |
|---|---|---|
| Diagnostic utility | significance | reference |
| Gene over expressed in Lung cancers | 0.002 to 2.6E−9 | Beer DJ, Hanash SM Nature Medicine |
| (Squamous Cell Lung Carcinoma., Lung | | (2002) Gene-expression profiles predict |
| Adenocarcinoma, Carcinoid, Small Cell | | survival of patients with lung |
| Lung Cancer) (vs. normal lung) | | adenocarcinoma. |
| | | Bhattacharjee A, Meyerson M PNAS |
| | | (2001) Classification of human lung |
| | | carcinomas by mRNA expression profiling |
| | | reveals distinct. |
| | | Garber ME, Petersen I PNAS (2001) |
| | | Diversity of gene expression in |
| | | adenocarcinoma of the lung. |
| Gene over expressed in lung metastasis | 0.002 | Bhattacharjee A, Meyerson M PNAS |
| (vs. primary tumor). | | (2001) Classification of human lung |
| | | carcinomas by mRNA expression profiling |
| | | reveals distinct adenocarcinoma |
| | | subclasses. |
| Gene over expressed in hepatocellular | 6E−8 | Chen X, Brown PO Mol Biol Cell (2002) |
| carcinoma (vs. normal liver). | | Gene Expression Patterns in Human Liver |
| | | Cancers. |
| Gene over expressed in Adenoid Cystic | 4.1E−5 | Frierson HF Jr, Hampton GM Am J Pathol |
| Carcinoma of Salivary Gland (vs. normal | | (2002) Large Scale Molecular Analysis |
| salivary gland). | | Identifies Genes with Altered Expression |
| | | in Salivary Adenoid Cystic Carcinoma. |
| Gene over expressed in Pancreatic | 3.6E−4 to | Iacobuzio-Donahue CA, Goggins M Am J |
| Adenocarcinoma (vs. normal pancreases | 9.6E−4 | Pathol (2003) Exploration of global gene |
| and other cancers). | | expression patterns in pancreatic |
| | | adenocarcinoma using cDNA microarrays. |
| | | Ramaswamy S; Golub TR PNAS (2001) |
| | | Multiclass cancer diagnosis using tumor |
| | | gene expression signatures. |
| Gene over expressed in prostate metastasis | 0.016 | LaTulippe E, Gerald WL Cancer Research |
| (vs. primary prostate cancer). | | (2002) Comprehensive Gene Expression |
| | | Analysis of Prostate Cancer Reveals |
| | | Distinct Transcriptional Programs |
| | | Associated with Metastatic Disease |
| Gene over expressed in prostate cancer | 0.026 | Luo JH, Becich M Molecular |
| (vs. normal prostate). | | Carcinogenesis (2002) Gene expression |
| | | analysis of prostate cancers |
| Gene over expressed Colon | 5.3E−6 to | Notterman DA, Levine AJ Cancer Res |
| Adenocarcinoma (vs. normal colon and | 6.5E−6 | (2001) Transcriptional Gene Expression |
| other cancers) | | Profiles of Colorectal Adenoma, |
| | | Adenocarcinoma, and Normal Tissue |
| | | Examined by Oligonucleotide Arrays. |
| | | Ramaswamy S; Golub TR PNAS (2001) |
| | | Multiclass cancer diagnosis using tumor |
| | | gene expression signatures. |
| Gene over expressed in benign uterine | | GNF database |
| leiomyomas (vs, Normal myometrium, | | (http://www.ncbi.nlm.nih.gov/projects/geo/): |
| malignant uterine and extra-uterine | | GDS533, probe ID: X57766_at |
| leiomyosarcoma). | | |

[1363] Also, microarrays have shown that one or more HSSTROL3 variants according to the present invention may optionally be overexpressed in lung cancer, preferably non small cell lung cancer, preferably adenocarcinoma, squamous cell cancer or carcinoid.

[1364] Other non-limiting exemplary utilities for HSSTROL3 variants according to the present invention are described in greater detail below and also with regard to the previous section on clinical utility.

[1365] Cluster HSSTROL3 can be used as a diagnostic marker according to overexpression of transcripts of this cluster in cancer. Expression of such transcripts in normal tissues is also given according to the previously described methods. The term “number” in the left hand column of the table and the numbers on the y-axis of the figure below refer to weighted expression of ESTs in each category, as “parts per million” (ratio of the expression of ESTs for a particular cluster to the expression of all ESTs in that category, according to parts per million).

[1366] Overall, the following results were obtained as shown with regard to the histograms in FIG. 34 and Table 125. This cluster is overexpressed (at least at a minimum level) in the following pathological conditions: transitional cell carcinoma, epithelial malignant tumors, a mixture of malignant tumors from different tissues and pancreas carcinoma. P values and ratios for expression in cancerous tissue are described in table 126.

TABLE125
Normal tissue distribution

| Name of Tissue | Number |
|---|---|
| Adrenal | 0 |
| Bladder | 0 |
| Brain | 1 |
| Colon | 63 |
| Epithelial | 33 |
| General | 13 |
| head and neck | 101 |
| Kidney | 0 |
| Lung | 11 |
| Breast | 8 |
| Ovary | 14 |
| Pancreas | 0 |
| Prostate | 2 |
| Skin | 99 |
| Thyroid | 0 |
| Uterus | 181 |

TABLE 126
P values and ratios for expression in cancerous tissue

| Name of Tissue | P1 | P2 | SP1 | R3 | SP2 | R4 |
|---|---|---|---|---|---|---|
| adrenal | 1 | 4.6e−01 | 1 | 1.0 | 5.3e−01 | 1.9 |
| bladder | 2.7e−01 | 3.4e−01 | 3.3e−03 | 4.9 | 2.1e−02 | 3.3 |
| brain | 3.5e−01 | 2.6e−01 | 1 | 1.7 | 3.3e−01 | 2.8 |
| colon | 7.7e−02 | 1.5e−01 | 3.1e−01 | 1.4 | 5.2e−01 | 1.0 |
| epithelial | 1.2e−04 | 1.2e−02 | 1.3e−06 | 2.7 | 4.6e−02 | 1.4 |
| general | 5.4e−09 | 3.1e−05 | 1.8e−16 | 5.0 | 3.1e−07 | 2.6 |
| head and neck | 4.6e−01 | 4.3e−01 | 1 | 0.6 | 9.4e−01 | 0.7 |
| kidney | 2.5e−01 | 3.5e−01 | 1.1e−01 | 4.0 | 2.4e−01 | 2.8 |
| lung | 1.8e−01 | 4.5e−01 | 1.9e−01 | 2.7 | 5.1e−01 | 1.4 |
| breast | 2.0e−01 | 3.4e−01 | 7.3e−02 | 3.3 | 2.5e−01 | 2.0 |
| ovary | 2.6e−01 | 3.2e−01 | 2.2e−02 | 2.0 | 7.0e−02 | 1.6 |
| pancreas | 9.5e−02 | 1.8e−01 | 1.8e−04 | 7.8 | 1.6e−03 | 5.5 |
| prostate | 8.2e−01 | 7.8e−01 | 4.5e−01 | 1.8 | 5.6e−01 | 1.5 |
| skin | 5.2e−01 | 5.8e−01 | 7.1e−01 | 0.8 | 1 | 0.3 |
| Thyroid | 2.9e−01 | 2.9e−01 | 1 | 1.1 | 1 | 1.1 |
| uterus | 4.2e−01 | 8.0e−01 | 7.5e−01 | 0.6 | 9.9e−01 | 0.4 |

[1367] As noted above, cluster HSSTROL3 features 8 transcript(s), which were listed in Table 120 above. These transcript(s) encode for protein(s) which are variant(s) of protein Stromelysin-3 precursor (SEQ ID NO:363). A description of each variant protein according to the present invention is now provided.

[1368] Variant protein HSSTROL3_PEA_{—}1_P4 (SEQ ID NO:364) according to the present invention has an amino acid sequence; it is encoded by transcript(s) HSSTROL3_PEA_{—}1_T5 (SEQ ID NO:339). An alignment is given to the known protein (Stromelysin-3 precursor (SEQ ID NO:363)) at the end of the application. One or more alignments to one or more previously published protein sequences are given in the alignment table located on the attached CDROM. A brief description of the relationship of the variant protein according to the present invention to each such aligned protein is as follows:

[1369] Comparison report between HSSTROL3_PEA_{—}1_P4 (SEQ ID NO:364) and MMP11_HUMAN (SEQ ID NO:363):

[1370] 1. An isolated chimeric polypeptide encoding for HSSTROL3_PEA_{—}1_P4 (SEQ ID NO:364), comprising a first amino acid sequence being at least 90% homologous to MAPAAWLRSAAARALLPPMLLLLLQPPPLLARALPPDVHHLHAERRGPQPWHAALPSSPAPAPAT QEAPRPASSLRPPRCGVPDPSDGLSARNRQKRFVLSGGRWEKTDLTYRILRFPWQLVQEQVRQTM AEALKVWSDVTPLTFTEVHEGRADIMIDFARYW corresponding to amino acids 1-163 of MMP11_HUMAN (SEQ ID NO:363), which also corresponds to amino acids 1-163 of HSSTROL3_PEA_{—}1_P4 (SEQ ID NO:364), a bridging amino acid H corresponding to amino acid 164 of HSSTROL3_PEA_{—}1_P4 (SEQ ID NO:364), a second amino acid sequence being at least 90% homologous to GDDLPFDGPGGILAHAFFPKTHREGDVHFDYDETWTIGDDQGTDLLQVAAHEFGHVLGLQHTTA AKALMSAFYTFRYPLSLSPDDCRGVQHLYGQPWPTVTSRTPALGPQAGIDTNEIAPLEPDAPPDAC EASFDAVSTIRGELFFFKAGFVWRLRGGQLQPGYPALASRHWQGLPSPVDAAFEDAQGHIWFFQG AQYWVYDGEKPVLGPAPLTELGLVRFPVHAALVWGPEKNKIYFFRGRDYWRFHPSTRRVDSPVP RRATDWRGVPSEIDAAFQDADG corresponding to amino acids 165-445 of MMP11_HUMAN (SEQ ID NO:363), which also corresponds to amino acids 165-445 of HSSTROL3_PEA_{—}1_P4 (SEQ ID NO:364), and a third amino acid sequence being at least 70%, optionally at least 80%, preferably at least 85%, more preferably at least 90% and most preferably at least 95% homologous to a polypeptide having the sequence ALGVRQLVGGGHSSRFSHLVVAGLPHACHRKSGSSSQVLCPEPSALLSVAG (SEQ ID NO: 652) corresponding to amino acids 446-496 of HSSTROL3_PEA_{—}1_P4 (SEQ ID NO:364), wherein said first amino acid sequence, bridging amino acid, second amino acid sequence and third amino acid sequence are contiguous and in a sequential order.

[1371] 2. An isolated polypeptide encoding for a tail of HSSTROL3_PEA_{—}1_P4 (SEQ ID NO:364), comprising a polypeptide being at least 70%, optionally at least about 80%, preferably at least about 85%, more preferably at least about 90% and most preferably at least about 95% homologous to the sequence ALGVRQLVGGGHSSRFSHLVVAGLPHACHRKSGSSSQVLCPEPSALLSVAG (SEQ ID NO: 652) in HSSTROL3_PEA_{—}1_P4 (SEQ ID NO:364).

[1372] The location of the variant protein was determined according to results from a number of different software programs and analyses, including analyses from SignalP and other specialized programs. The variant protein is believed to be located as follows with regard to the cell: secreted. The protein localization is believed to be secreted because both signal-peptide prediction programs predict that this protein has a signal peptide, and neither trans-membrane region prediction program predicts that this protein has a trans-membrane region.

[1373] The variant protein has the following domains, as determined by using InterPro. The domains are described in Table 127:

TABLE 127
InterPro domain(s)

| InterPro ID | Domain description | Analysis type | Position(s) on protein |
|---|---|---|---|
| IPR001818 | Peptidase M10A and M12B, | FPrintScan | 130-145, 153-181, 212-237, |
| | matrixin and adamalysin | | 245-258, 75-88 |
| IPR000585 | Hemopexin repeat | HMMPfam | 298-341, 343-384, 387-434 |
| IPR001818 | Peptidase M10A and M12B, | HMMPfam | 98-204 |
| | matrixin and adamalysin | | |
| IPR000585 | Hemopexin repeat | HMMSmart | 298-341, 343-384, 387-434 |
| IPR006026 | Peptidase, metallopeptidases | HMMSmart | 101-259 |
| IPR000585 | Hemopexin repeat | ScanRegExp | 332-347 |
| IPR006025 | Peptidase M, neutral zinc | ScanRegExp | 212-221 |
| | metallopeptidases, zinc-binding | | |
| | site | | |
| IPR001818 | Peptidase M10A and M12B, | ScanRegExp | 78-85 |
| | matrixin and adamalysin | | |

[1374] Variant protein HSSTROL3_PEA_{—}1_P4 (SEQ ID NO:364) is encoded by the following transcript(s): HSSTROL3_PEA_{—}1_T5 (SEQ ID NO:339). The coding portion of transcript HSSTROL3_PEA_{—}1_T5 (SEQ ID NO:339) starts at position 24 and ends at position 1511. The transcript also has the following SNPs as listed in Table 128 (given according to their position on the nucleotide sequence, with the alternative nucleic acid listed; the last column indicates whether the SNP is known or not; the presence of known SNPs in variant protein HSSTROL3_PEA_{—}1_P4 (SEQ ID NO:364) sequence provides support for the deduced sequence of this variant protein according to the present invention).

TABLE 128
Nucleic acid SNPs

| SNP position on nucleotide | Alternative | |
|---|---|---|
| sequence | nucleic acid | Previously known SNP? |
| 136 | T -> C | Yes |
| 334 | G -> C | Yes |
| 663 | G -> | No |
| 699 | -> T | No |
| 992 | G -> C | Yes |
| 1528 | A -> G | Yes |
| 1710 | A -> G | Yes |
| 2251 | A -> G | Yes |
| 2392 | C -> | No |
| 2444 | C -> A | Yes |
| 2470 | A -> T | Yes |
| 2687 | -> G | No |
| 2696 | -> G | No |
| 2710 | C -> | No |
| 2729 | -> A | No |
| 2755 | T -> C | No |
| 2813 | A -> | No |
| 2813 | A -> C | No |
| 2963 | A -> | No |
| 2963 | A -> C | No |
| 2993 | T -> C | Yes |
| 3140 | -> T | No |

[1375] Variant protein HSSTROL3_PEA_{—}1_P5 (SEQ ID NO:365) according to the present invention has an amino acid sequence; it is encoded by transcript(s) HSSTROL3_PEA_{—}1_T6 (SEQ ID NO:340). An alignment is given to the known protein (Stromelysin-3 precursor (SEQ ID NO:363)) at the end of the application. One or more alignments to one or more previously published protein sequences are given in the alignment table located on the attached CDROM. A brief description of the relationship of the variant protein according to the present invention to each such aligned protein is as follows:

[1376] Comparison report between HSSTROL3_PEA_{—}1_P5 (SEQ ID NO:365) and MMP11_HUMAN (SEQ ID NO:363):

[1377] 1. An isolated chimeric polypeptide encoding for HSSTROL3_PEA_{—}1_P5 (SEQ ID NO:365), comprising a first amino acid sequence being at least 90% homologous to MAPAAWLRSAAARALLPPMLLLLLQPPPLLARALPPDVHHLHAERRGPQPWHAALPSSPAPAPAT QEAPRPASSLRPPRCGVPDPSDGLSARNRQKRFVLSGGRWEKTDLTYRILRFPWQLVQEQVRQTM AEALKVWSDVTPLTFTEVHEGRADIMIDFARYW corresponding to amino acids 1-163 of MMP11_HUMAN (SEQ ID NO:363), which also corresponds to amino acids 1-163 of HSSTROL3_PEA_{—}1_P5 (SEQ ID NO:365), a bridging amino acid H corresponding to amino acid 164 of HSSTROL3_PEA_{—}1_P5 (SEQ ID NO:365), a second amino acid sequence being at least 90% homologous to GDDLPFDGPGGILAHAFFPKTHREGDVHFDYDETWTIGDDQGTDLLQVAAHEFGHVLGLQHTTA AKALMSAFYTFRYPLSLSPDDCRGVQHLYGQPWPTVTSRTPALGPQAGIDTNEIAPLEPDAPPDAC EASFDAVSTIRGELFFFKAGFVWRLRGGQLQPGYPALASRHWQGLPSPVDAAFEDAQGHIWFFQ corresponding to amino acids 165-358 of MMP11_HUMAN (SEQ ID NO:363), which also corresponds to amino acids 165-358 of HSSTROL3_PEA_{—}1_P5 (SEQ ID NO:365), and a third amino acid sequence being at least 70%, optionally at least 80%, preferably at least 85%, more preferably at least 90% and most preferably at least 95% homologous to a polypeptide having the sequence ELGFPSSTGRDESLEHCRCQGLHK (SEQ ID NO: 653) corresponding to amino acids 359-382 of HSSTROL3_PEA_{—}1_P5 (SEQ ID NO:365), wherein said first amino acid sequence, bridging amino acid, second amino acid sequence and third amino acid sequence are contiguous and in a sequential order.

[1378] 2. An isolated polypeptide encoding for a tail of HSSTROL3_PEA_{—}1_P5 (SEQ ID NO:365), comprising a polypeptide being at least 70%, optionally at least about 80%, preferably at least about 85%, more preferably at least about 90% and most preferably at least about 95% homologous to the sequence ELGFPSSTGRDESLEHCRCQGLHK (SEQ ID NO: 653) in HSSTROL3_PEA_{—}1_P5 (SEQ ID NO:365).

[1379] The location of the variant protein was determined according to results from a number of different software programs and analyses, including analyses from SignalP and other specialized programs. The variant protein is believed to be located as follows with regard to the cell: secreted. The protein localization is believed to be secreted because both signal-peptide prediction programs predict that this protein has a signal peptide, and neither trans-membrane region prediction program predicts that this protein has a trans-membrane region.

[1380] The variant protein has the following domains, as determined by using InterPro. The domains are described in Table 129:

TABLE 129
InterPro domain(s)

| InterPro ID | Domain description | Analysis type | Position(s) on protein |
|---|---|---|---|
| IPR001818 | Peptidase M10A and M12B, | FPrintScan | 130-145, 153-181, 212-237, |
| | matrixin and adamalysin | | 245-258, 75-88 |
| IPR000585 | Hemopexin repeat | HMMPfam | 298-341 |
| IPR001818 | Peptidase M10A and M12B, | HMMPfam | 98-204 |
| | matrixin and adamalysin | | |
| IPR000585 | Hemopexin repeat | HMMSmart | 298-341 |
| IPR006026 | Peptidase, metallopeptidases | HMMSmart | 101-259 |
| IPR000585 | Hemopexin repeat | ScanRegExp | 332-347 |
| IPR006025 | Peptidase M, neutral zinc | ScanRegExp | 212-221 |
| | metallopeptidases, zinc-binding | | |
| | site | | |
| IPR001818 | Peptidase M10A and M12B, | ScanRegExp | 78-85 |
| | matrixin and adamalysin | | |
| IPR001818 | Peptidase M10A and M12B, | FPrintScan | 130-145, 153-181, 212-237, |
| | matrixin and adamalysin | | 245-258, 75-88 |
| IPR000585 | Hemopexin repeat | HMMPfam | 298-341 |
| IPR001818 | Peptidase M10A and M12B, | HMMPfam | 98-204 |
| | matrixin and adamalysin | | |
| IPR000585 | Hemopexin repeat | HMMSmart | 298-341 |
| IPR006026 | Peptidase, metallopeptidases | HMMSmart | 101-259 |
| IPR000585 | Hemopexin repeat | ScanRegExp | 332-347 |
| IPR006025 | Peptidase M, neutral zinc | ScanRegExp | 212-221 |
| | metallopeptidases, zinc-binding | | |
| | site | | |
| IPR001818 | Peptidase M10A and M12B, | ScanRegExp | 78-85 |
| | matrixin and adamalysin | | |
| IPR001818 | Peptidase M10A and M12B, | FPrintScan | 130-145, 153-181, 212-237, |
| | matrixin and adamalysin | | 245-258, 75-88 |
| IPR000585 | Hemopexin repeat | HMMPfam | 298-341 |
| IPR001818 | Peptidase M10A and M12B, | HMMPfam | 98-204 |
| | matrixin and adamalysin | | |
| IPR000585 | Hemopexin repeat | HMMSmart | 298-341 |
| IPR006026 | Peptidase, metallopeptidases | HMMSmart | 101-259 |
| IPR000585 | Hemopexin repeat | ScanRegExp | 332-347 |
| IPR006025 | Peptidase M, neutral zinc | ScanRegExp | 212-221 |
| | metallopeptidases, zinc-binding | | |
| | site | | |
| IPR001818 | Peptidase M10A and M12B, | ScanRegExp | 78-85 |
| | matrixin and adamalysin | | |

[1381] Variant protein HSSTROL3_PEA_{—}1_P5 (SEQ ID NO:365) is encoded by the following transcript(s): HSSTROL3_PEA_{—}1_T6 (SEQ ID NO:340). The coding portion of transcript HSSTROL3_PEA_{—}1_T6 (SEQ ID NO:340) starts at position 24 and ends at position 1169. The transcript also has the following SNPs as listed in Table 130 (given according to their position on the nucleotide sequence, with the alternative nucleic acid listed; the last column indicates whether the SNP is known or not; the presence of known SNPs in variant protein HSSTROL3_PEA_{—}1_P5 (SEQ ID NO:365) sequence provides support for the deduced sequence of this variant protein according to the present invention).

TABLE 130
Nucleic acid SNPs

| SNP position on | Alternative | Previously |
|---|---|---|
| nucleotide sequence | nucleic acid | known SNP? |
| 136 | T -> C | Yes |
| 334 | G -> C | Yes |
| 663 | G -> | No |
| 699 | -> T | No |
| 992 | G -> C | Yes |
| 1966 | A -> G | Yes |
| 2148 | A -> G | Yes |
| 2689 | A -> G | Yes |
| 2830 | C -> | No |
| 2882 | C -> A | Yes |
| 2908 | A -> T | Yes |
| 3125 | -> G | No |
| 3134 | -> G | No |
| 3148 | C -> | No |
| 3167 | -> A | No |
| 3193 | T -> C | No |
| 3251 | A -> | No |
| 3251 | A -> C | No |
| 3401 | A -> | No |
| 3401 | A -> C | No |
| 3431 | T -> C | Yes |
| 3578 | -> T | No |

[1382] Variant protein HSSTROL3_PEA_{—}1_P7 (SEQ ID NO:366) according to the present invention has an amino acid sequence; it is encoded by transcript(s) HSSTROL3_PEA_{—}1_T10 (SEQ ID NO:343). An alignment is given to the known protein (Stromelysin-3 precursor (SEQ ID NO:363)) at the end of the application. One or more alignments to one or more previously published protein sequences are given in the alignment table located on the attached CDROM. A brief description of the relationship of the variant protein according to the present invention to each such aligned protein is as follows:

[1383] Comparison report between HSSTROL3_PEA_{—}1_P7 (SEQ ID NO:366) and MMP11_HUMAN (SEQ ID NO:363):

[1384] 1. An isolated chimeric polypeptide encoding for HSSTROL3_PEA_{—}1_P7 (SEQ ID NO:366), comprising a first amino acid sequence being at least 90% homologous to MAPAAWLRSAAARALLPPMLLLLLQPPPLLARALPPDVHHLHAERRGPQPWHAALPSSPAPAPAT QEAPRPASSLRPPRCGVPDPSDGLSARNRQKRFVLSGGRWEKTDLTYRILRFPWQLVQEQVRQTM AEALKVWSDVTPLTFTEVHEGRADIMIDFARYW corresponding to amino acids 1-163 of MMP11_HUMAN (SEQ ID NO:363), which also corresponds to amino acids 1-163 of HSSTROL3_PEA_{—}1_P7 (SEQ ID NO:366), a bridging amino acid H corresponding to amino acid 164 of HSSTROL3_PEA_{—}1_P7 (SEQ ID NO:366), a second amino acid sequence being at least 90% homologous to GDDLPFDGPGGILAHAFFPKTHREGDVHFDYDETWTIGDDQGTDLLQVAAHEFGHVLGLQHTTA AKALMSAFYTFRYPLSLSPDDCRGVQHLYGQPWPTVTSRTPALGPQAGIDTNEIAPLEPDAPPDAC EASFDAVSTIRGELFFFKAGFVWRLRGGQLQPGYPALASRHWQGLPSPVDAAFEDAQGHIWFFQG corresponding to amino acids 165-359 of MMP11_HUMAN (SEQ ID NO:363), which also corresponds to amino acids 165-359 of HSSTROL3_PEA_{—}1_P7 (SEQ ID NO:366), and a third amino acid sequence being at least 70%, optionally at least 80%, preferably at least 85%, more preferably at least 90% and most preferably at least 95% homologous to a polypeptide having the sequence TTGVSTPAPGV (SEQ ID NO: 654) corresponding to amino acids 360-370 of HSSTROL3_PEA_{—}1_P7 (SEQ ID NO:366), wherein said first amino acid sequence, bridging amino acid, second amino acid sequence and third amino acid sequence are contiguous and in a sequential order.

[1385] 2. An isolated polypeptide encoding for a tail of HSSTROL3_PEA_{—}1_P7 (SEQ ID NO:366), comprising a polypeptide being at least 70%, optionally at least about 80%, preferably at least about 85%, more preferably at least about 90% and most preferably at least about 95% homologous to the sequence TTGVSTPAPGV (SEQ ID NO: 654) in HSSTROL3_PEA_{—}1_P7 (SEQ ID NO:366).

[1386] The location of the variant protein was determined according to results from a number of different software programs and analyses, including analyses from SignalP and other specialized programs. The variant protein is believed to be located as follows with regard to the cell: secreted. The protein localization is believed to be secreted because both signal-peptide prediction programs predict that this protein has a signal peptide, and neither trans-membrane region prediction program predicts that this protein has a trans-membrane region.

[1387] The variant protein has the following domains, as determined by using InterPro. The domains are described in Table 131:

TABLE 131
InterPro domain(s)

| InterPro ID | Domain description | Analysis type | Position(s) on protein |
|---|---|---|---|
| IPR001818 | Peptidase M10A and M12B, | FPrintScan | 130-145, 153-181, 212-237, |
| | matrixin and adamalysin | | 245-258, 75-88 |
| IPR000585 | Hemopexin repeat | HMMPfam | 298-341, 343-360 |
| IPR001818 | Peptidase M10A and M12B, | HMMPfam | 98-204 |
| | matrixin and adamalysin | | |
| IPR000585 | Hemopexin repeat | HMMSmart | 298-341 |
| IPR006026 | Peptidase, metallopeptidases | HMMSmart | 101-259 |
| IPR000585 | Hemopexin repeat | ScanRegExp | 332-347 |
| IPR006025 | Peptidase M, neutral zinc | ScanRegExp | 212-221 |
| | metallopeptidases, zinc-binding | | |
| | site | | |
| IPR001818 | Peptidase M10A and M12B, | ScanRegExp | 78-85 |
| | matrixin and adamalysin | | |

[1388] Variant protein HSSTROL3_PEA_{—}1_P7 (SEQ ID NO:366) is encoded by the following transcript(s): HSSTROL3_PEA_{—}1_T10 (SEQ ID NO:343). The coding portion of transcript HSSTROL3_PEA_{—}1_T10 (SEQ ID NO:343) starts at position 24 and ends at position 1133. The transcript also has the following SNPs as listed in Table 132 (given according to their position on the nucleotide sequence, with the alternative nucleic acid listed; the last column indicates whether the SNP is known or not; the presence of known SNPs in variant protein HSSTROL3_PEA_{—}1_P7 (SEQ ID NO:366) sequence provides support for the deduced sequence of this variant protein according to the present invention).

TABLE 132
Nucleic acid SNPs

| SNP position on | Alternative | Previously |
|---|---|---|
| nucleotide sequence | nucleic acid | known SNP? |
| 136 | T -> C | Yes |
| 334 | G -> C | Yes |
| 663 | G -> | No |
| 699 | -> T | No |
| 992 | G -> C | Yes |
| 1386 | A -> G | Yes |
| 1568 | A -> G | Yes |
| 2109 | A -> G | Yes |
| 2250 | C -> | No |
| 2302 | C -> A | Yes |
| 2328 | A -> T | Yes |
| 2545 | -> G | No |
| 2554 | -> G | No |
| 2568 | C -> | No |
| 2587 | -> A | No |
| 2613 | T -> C | No |
| 2671 | A -> | No |
| 2671 | A -> C | No |
| 2821 | A -> | No |
| 2821 | A -> C | No |
| 2851 | T -> C | Yes |
| 2998 | -> T | No |

[1389] Variant protein HSSTROL3_PEA_{—}1_P8 (SEQ ID NO:367) according to the present invention has an amino acid sequence; it is encoded by transcript(s) HSSTROL3_PEA_{—}1_T11 (SEQ ID NO:344). An alignment is given to the known protein (Stromelysin-3 precursor (SEQ ID NO:363)) at the end of the application. One or more alignments to one or more previously published protein sequences are given in the alignment table located on the attached CDROM. A brief description of the relationship of the variant protein according to the present invention to each such aligned protein is as follows:

[1390] Comparison report between HSSTROL3_PEA_{—}1_P8 (SEQ ID NO:367) and MMP11_HUMAN (SEQ ID NO:363):

[1391] 1. An isolated chimeric polypeptide encoding for HSSTROL3_PEA_{—}1_P8 (SEQ ID NO:367), comprising a first amino acid sequence being at least 90% homologous to MAPAAWLRSAAARALLPPMLLLLLQPPPLLARALPPDVHHLHAERRGPQPWHAALPSSPAPAPAT QEAPRPASSLRPPRCGVPDPSDGLSARNRQKRFVLSGGRWEKTDLTYRILRFPWQLVQEQVRQTM AEALKVWSDVTPLTFTEVHEGRADIMIDFARYW corresponding to amino acids 1-163 of MMP11_HUMAN (SEQ ID NO:363), which also corresponds to amino acids 1-163 of HSSTROL3_PEA_{—}1_P8 (SEQ ID NO:367), a bridging amino acid H corresponding to amino acid 164 of HSSTROL3_PEA_{—}1_P8 (SEQ ID NO:367), a second amino acid sequence being at least 90% homologous to GDDLPFDGPGGILAHAFFPKTHREGDVHFDYDETWTIGDDQGTDLLQVAAHEFGHVLGLQHTTA AKALMSAFYTFRYPLSLSPDDCRGVQHLYGQPWPTVTSRTPALGPQAGIDTNEIAPLE corresponding to amino acids 165-286 of MMP11_HUMAN (SEQ ID NO:363), which also corresponds to amino acids 165-286 of HSSTROL3_PEA_{—}1_P8 (SEQ ID NO:367), and a third amino acid sequence being at least 70%, optionally at least 80%, preferably at least 85%, more preferably at least 90% and most preferably at least 95% homologous to a polypeptide having the sequence VRPCLPVPLLLCWPL (SEQ ID NO: 655) corresponding to amino acids 287-301 of HSSTROL3_PEA_{—}1_P8 (SEQ ID NO:367), wherein said first amino acid sequence, bridging amino acid, second amino acid sequence and third amino acid sequence are contiguous and in a sequential order.

[1392] 2. An isolated polypeptide encoding for a tail of HSSTROL3_PEA_{—}1_P8 (SEQ ID NO:367), comprising a polypeptide being at least 70%, optionally at least about 80%, preferably at least about 85%, more preferably at least about 90% and most preferably at least about 95% homologous to the sequence VRPCLPVPLLLCWPL (SEQ ID NO: 655) in HSSTROL3_PEA_{—}1_P8 (SEQ ID NO:367).

[1393] The location of the variant protein was determined according to results from a number of different software programs and analyses, including analyses from SignalP and other specialized programs. The variant protein is believed to be located as follows with regard to the cell: secreted. The protein localization is believed to be secreted because both signal-peptide prediction programs predict that this protein has a signal peptide, and neither trans-membrane region prediction program predicts that this protein has a trans-membrane region.

[1394] The variant protein has the following domains, as determined by using InterPro. The domains are described in Table 133:

TABLE 133
InterPro domain(s)

| InterPro ID | Domain description | Analysis type | Position(s) on protein |
|---|---|---|---|
| IPR001818 | Peptidase M10A and M12B, | FPrintScan | 130-145, 153-181, 212-237, |
| | matrixin and adamalysin | | 245-258, 75-88 |
| IPR001818 | Peptidase M10A and M12B, | HMMPfam | 98-204 |
| | matrixin and adamalysin | | |
| IPR006026 | Peptidase, metallopeptidases | HMMSmart | 101-259 |
| IPR006025 | Peptidase M, neutral zinc | ScanRegExp | 212-221 |
| | metallopeptidases, zinc-binding | | |
| | site | | |
| IPR001818 | Peptidase M10A and M12B, | ScanRegExp | 78-85 |
| | matrixin and adamalysin | | |

[1395] Variant protein HSSTROL3_PEA_{—}1_P8 (SEQ ID NO:367) is encoded by the following transcript(s): HSSTROL3_PEA_{—}1_T11 (SEQ ID NO:344). The coding portion of transcript HSSTROL3_PEA_{—}1_T11 (SEQ ID NO:344) starts at position 24 and ends at position 926. The transcript also has the following SNPs as listed in Table 134 (given according to their position on the nucleotide sequence, with the alternative nucleic acid listed; the last column indicates whether the SNP is known or not; the presence of known SNPs in variant protein HSSTROL3_PEA_{—}1_P8 (SEQ ID NO:367) sequence provides support for the deduced sequence of this variant protein according to the present invention).

TABLE 134
Nucleic acid SNPs

| SNP position on | Alternative | Previously |
|---|---|---|
| nucleotide sequence | nucleic acid | known SNP? |
| 136 | T -> C | Yes |
| 334 | G -> C | Yes |
| 663 | G -> | No |
| 699 | -> T | No |
| 935 | G -> A | Yes |
| 948 | G -> A | Yes |
| 1084 | G -> C | Yes |
| 1557 | C -> | No |
| 1609 | C -> A | Yes |
| 1635 | A -> T | Yes |
| 1852 | -> G | No |
| 1861 | -> G | No |
| 1875 | C -> | No |
| 1894 | -> A | No |
| 1920 | T -> C | No |
| 1978 | A -> | No |
| 1978 | A -> C | No |
| 2128 | A -> | No |
| 2128 | A -> C | No |
| 2158 | T -> C | Yes |
| 2305 | -> T | No |

[1396] Variant protein HSSTROL3_PEA_{—}1_P9 (SEQ ID NO:368) according to the present invention has an amino acid sequence; it is encoded by transcript(s) HSSTROL3_PEA_{—}1_T12 (SEQ ID NO:345). An alignment is given to the known protein (Stromelysin-3 precursor (SEQ ID NO:363)) at the end of the application. One or more alignments to one or more previously published protein sequences are given in the alignment table located on the attached CDROM. A brief description of the relationship of the variant protein according to the present invention to each such aligned protein is as follows:

[1397] Comparison report between HSSTROL3_PEA_{—}1_P9 (SEQ ID NO:368) and MMP11_HUMAN (SEQ ID NO:363):

[1398] 1. An isolated chimeric polypeptide encoding for HSSTROL3_PEA_{—}1_P9 (SEQ ID NO:368), comprising a first amino acid sequence being at least 90% homologous to MAPAAWLRSAAARALLPPMLLLLLQPPPLLARALPPDVHHLHAERRGPQPWHAALPSSPAPAPAT QEAPRPASSLRPPRCGVPDPSDGLSARNRQK corresponding to amino acids 1-96 of MMP11_HUMAN (SEQ ID NO:363), which also corresponds to amino acids 1-96 of HSSTROL3_PEA_{—}1_P9 (SEQ ID NO:368), a second amino acid sequence being at least 90% homologous to RILRFPWQLVQEQVRQTMAEALKVWSDVTPLTFTEVHEGRADIMIDFARYW corresponding to amino acids 113-163 of MMP11_HUMAN (SEQ ID NO:363), which also corresponds to amino acids 97-147 of HSSTROL3_PEA_{—}1_P9 (SEQ ID NO:368), a bridging amino acid H corresponding to amino acid 148 of HSSTROL3_PEA_{—}1_P9 (SEQ ID NO:368), a third amino acid sequence being at least 90% homologous to GDDLPFDGPGGILAHAFFPKTHREGDVHFDYDETWTIGDDQGTDLLQVAAHEFGHVLGLQHTTA AKALMSAFYTFRYPLSLSPDDCRGVQHLYGQPWPTVTSRTPALGPQAGIDTNEIAPLEPDAPPDAC EASFDAVSTIRGELFFFKAGFVWRLRGGQLQPGYPALASRHWQGLPSPVDAAFEDAQGHIWFFQG corresponding to amino acids 165-359 of MMP11_HUMAN (SEQ ID NO:363), which also corresponds to amino acids 149-343 of HSSTROL3_PEA_{—}1_P9 (SEQ ID NO:368), and a fourth amino acid sequence being at least 70%, optionally at least 80%, preferably at least 85%, more preferably at least 90% and most preferably at least 95% homologous to a polypeptide having the sequence TTGVSTPAPGV (SEQ ID NO: 654) corresponding to amino acids 344-354 of HSSTROL3_PEA_{—}1_P9 (SEQ ID NO:368), wherein said first amino acid sequence, second amino acid sequence, bridging amino acid, third amino acid sequence and fourth amino acid sequence are contiguous and in a sequential order.

[1399] 2. An isolated chimeric polypeptide encoding for an edge portion of HSSTROL3_PEA_{—}1_P9 (SEQ ID NO:368), comprising a polypeptide having a length “n”, wherein n is at least about 10 amino acids in length, optionally at least about 20 amino acids in length, preferably at least about 30 amino acids in length, more preferably at least about 40 amino acids in length and most preferably at least about 50 amino acids in length, wherein at least two amino acids comprise KR, having a structure as follows: a sequence starting from any of amino acid numbers 96−x to 96; and ending at any of amino acid numbers 97+((n−2)−x), in which x varies from 0 to n−2.

[1400] 3. An isolated polypeptide encoding for a tail of HSSTROL3_PEA_{—}1_P9 (SEQ ID NO:368), comprising a polypeptide being at least 70%, optionally at least about 80%, preferably at least about 85%, more preferably at least about 90% and most preferably at least about 95% homologous to the sequence TTGVSTPAPGV (SEQ ID NO: 654) in HSSTROL3_PEA_{—}1_P9 (SEQ ID NO:368).

[1401] The location of the variant protein was determined according to results from a number of different software programs and analyses, including analyses from SignalP and other specialized programs. The variant protein is believed to be located as follows with regard to the cell: secreted. The protein localization is believed to be secreted because both signal-peptide prediction programs predict that this protein has a signal peptide, and neither trans-membrane region prediction program predicts that this protein has a trans-membrane region.

[1402] The variant protein has the following domains, as determined by using InterPro. The domains are described in Table 135:

TABLE 135
InterPro domain(s)

| InterPro ID | Domain description | Analysis type | Position(s) on protein |
|---|---|---|---|
| IPR001818 | Peptidase M10A and M12B, | FPrintScan | 114-129, 137-165, 196-221, |
| | matrixin and adamalysin | | 229-242, 75-88 |
| IPR000585 | Hemopexin repeat | HMMPfam | 282-325, 327-344 |
| IPR001818 | Peptidase M10A and M12B, | HMMPfam | 104-188 |
| | matrixin and adamalysin | | |
| IPR000585 | Hemopexin repeat | HMMSmart | 282-325 |
| IPR006026 | Peptidase, metallopeptidases | HMMSmart | 87-243 |
| IPR000585 | Hemopexin repeat | ScanRegExp | 316-331 |
| IPR006025 | Peptidase M, neutral zinc | ScanRegExp | 196-205 |
| | metallopeptidases, zinc-binding | | |
| | site | | |
| IPR001818 | Peptidase M10A and M12B, | ScanRegExp | 78-85 |
| | matrixin and adamalysin | | |

[1403] Variant protein HSSTROL3_PEA_{—}1_P9 (SEQ ID NO:368) is encoded by the following transcript(s): HSSTROL3_PEA_{—}1_T12 (SEQ ID NO:345). The coding portion of transcript HSSTROL3_PEA_{—}1_T12 (SEQ ID NO:345) starts at position 24 and ends at position 1085. The transcript also has the following SNPs as listed in Table 136 (given according to their position on the nucleotide sequence, with the alternative nucleic acid listed; the last column indicates whether the SNP is known or not; the presence of known SNPs in variant protein HSSTROL3_PEA_{—}1_P9 (SEQ ID NO:368) sequence provides support for the deduced sequence of this variant protein according to the present invention).

TABLE 136
Nucleic acid SNPs

| SNP position on | Alternative | Previously |
|---|---|---|
| nucleotide sequence | nucleic acid | known SNP? |
| 136 | T -> C | Yes |
| 615 | G -> | No |
| 651 | -> T | No |
| 944 | G -> C | Yes |
| 1275 | C -> | No |
| 1327 | C -> A | Yes |
| 1353 | A -> T | Yes |
| 1570 | -> G | No |
| 1579 | -> G | No |
| 1593 | C -> | No |
| 1612 | -> A | No |
| 1638 | T -> C | No |
| 1696 | A -> | No |
| 1696 | A -> C | No |
| 1846 | A -> | No |
| 1846 | A -> C | No |
| 1876 | T -> C | Yes |
| 2023 | -> T | No |

[1404] Variant protein HSSTROL3_PEA_{—}1_P11 (SEQ ID NO:369) according to the present invention has an amino acid sequence; it is encoded by transcript(s) HSSTROL3_PEA_{—}1_T2 (SEQ ID NO:338). An alignment is given to the known protein (Stromelysin-3 precursor (SEQ ID NO:363)) at the end of the application. One or more alignments to one or more previously published protein sequences are given in the alignment table located on the attached CDROM. A brief description of the relationship of the variant protein according to the present invention to each such aligned protein is as follows:

[1405] Comparison report between HSSTROL3_PEA_{—}1_P11 (SEQ ID NO:369) and MMP11_HUMAN (SEQ ID NO:363):

[1406] 1. An isolated chimeric polypeptide encoding for HSSTROL3_PEA_{—}1_P11 (SEQ ID NO:369), comprising a first amino acid sequence being at least 90% homologous to MAPAAWLRSAAARALLPPMLLLLLQPPPLLARALPPDVHHLHAERRGPQPWHAALPSSPAPAPAT QEAPRPASSLRPPRCGVPDPSDGLSARNRQKRFVLSGGRWEKTDLTYR corresponding to amino acids 1-113 of MMP11_HUMAN (SEQ ID NO:363), which also corresponds to amino acids 1-113 of HSSTROL3_PEA_{—}1_P11 (SEQ ID NO:369).

[1407] The location of the variant protein was determined according to results from a number of different software programs and analyses, including analyses from SignalP and other specialized programs. The variant protein is believed to be located as follows with regard to the cell: secreted. The protein localization is believed to be secreted because both signal-peptide prediction programs predict that this protein has a signal peptide, and neither trans-membrane region prediction program predicts that this protein has a trans-membrane region.

[1408] The variant protein has the following domains, as determined by using InterPro. The domains are described in Table 137:

TABLE 137
InterPro domain(s)

| | | | Position(s) |
|---|---|---|---|
| InterPro ID | Domain description | Analysis type | on protein |
| IPR001818 | Peptidase M10A and M12B, | ScanRegExp | 78-85 |
| | matrixin and adamalysin | | |

[1409] Variant protein HSSTROL3_PEA_{—}1_P11 (SEQ ID NO:369) is encoded by the following transcript(s): HSSTROL3_PEA_{—}1_T2 (SEQ ID NO:338). The coding portion of transcript HSSTROL3_PEA_{—}1_T2 (SEQ ID NO:338) starts at position 24 and ends at position 362. The transcript also has the following SNPs as listed in Table 138 (given according to their position on the nucleotide sequence, with the alternative nucleic acid listed; the last column indicates whether the SNP is known or not; the presence of known SNPs in variant protein HSSTROL3_PEA_{—}1_P11 (SEQ ID NO:369) sequence provides support for the deduced sequence of this variant protein according to the present invention).

TABLE 138
Nucleic acid SNPs

| SNP position on | Alternative | Previously |
|---|---|---|
| nucleotide sequence | nucleic acid | known SNP? |
| 136 | T -> C | Yes |
| 334 | G -> C | Yes |
| 603 | T -> A | No |
| 900 | G -> A | Yes |
| 1025 | G -> A | Yes |
| 1257 | G -> A | Yes |
| 1605 | G -> | No |
| 1641 | -> T | No |
| 1934 | G -> C | Yes |
| 2407 | C -> | No |
| 2459 | C -> A | Yes |
| 2485 | A -> T | Yes |
| 2702 | -> G | No |
| 2711 | -> G | No |
| 2725 | C -> | No |
| 2744 | -> A | No |
| 2770 | T -> C | No |
| 2828 | A -> | No |
| 2828 | A -> C | No |
| 2978 | A -> | No |
| 2978 | A -> C | No |
| 3008 | T -> C | Yes |
| 3155 | -> T | No |

[1410] Table 139 below describes the starting and ending position of HSSTROL3_PEA_{—}1_node_{—}20 (SEQ ID NO:361) on each of the relevant transcripts. Experimental results for this segment are described below.

TABLE 139
Segment location on transcripts

| | Segment | Segment |
|---|---|---|
| | starting | ending |
| Transcript name | position | position |
| HSSTROL3_PEA_1_T11 (SEQ ID NO: 344) | 882 | 973 |

[1411] Table 140 below describes the starting and ending position of HSSTROL3_PEA_{—}1_node_{—}21 (SEQ ID NO:352) on each of the relevant transcripts. Experimental results for this segment are described below.

TABLE 140
Segment location on transcripts

| | Segment | Segment |
|---|---|---|
| | starting | ending |
| Transcript name | position | position |
| HSSTROL3_PEA_1_T2 (SEQ ID NO: 338) | 1824 | 2040 |
| HSSTROL3_PEA_1_T5 (SEQ ID NO: 339) | 882 | 1098 |
| HSSTROL3_PEA_1_T6 (SEQ ID NO: 340) | 882 | 1098 |
| HSSTROL3_PEA_1_T8 (SEQ ID NO: 341) | 882 | 1098 |
| HSSTROL3_PEA_1_T9 (SEQ ID NO: 342) | 882 | 1098 |
| HSSTROL3_PEA_1_T10 (SEQ ID NO: 343) | 882 | 1098 |
| HSSTROL3_PEA_1_T11 (SEQ ID NO: 344) | 974 | 1190 |
| HSSTROL3_PEA_1_T12 (SEQ ID NO: 345) | 834 | 1050 |

[1412] Table 141 below describes the starting and ending position of HSSTROL3_PEA_{—}1_node_{—}24 (SEQ ID NO:353) on each of the relevant transcripts. Experimental results for this segment are described below.

TABLE 141
Segment location on transcripts

| | Segment | Segment |
|---|---|---|
| | starting | ending |
| Transcript name | position | position |
| HSSTROL3_PEA_1_T6 (SEQ ID NO: 340) | 1099 | 1236 |
| HSSTROL3_PEA_1_T8 (SEQ ID NO: 341) | 1099 | 1236 |
| HSSTROL3_PEA_1_T9 (SEQ ID NO: 342) | 1099 | 1236 |

[1413] Table 142 below describes the starting and ending position of HSSTROL3_PEA_{—}1_node_{—}25 (SEQ ID NO:354) on each of the relevant transcripts. Experimental results for this segment are described below.

TABLE 142
Segment location on transcripts

| | Segment | Segment |
|---|---|---|
| | starting | ending |
| Transcript name | position | position |
| HSSTROL3_PEA_1_T6 (SEQ ID NO: 340) | 1237 | 1536 |
| HSSTROL3_PEA_1_T8 (SEQ ID NO: 341) | 1237 | 1536 |

Expression of Homo sapiens matrix metalloproteinase 11 (stromelysin 3) (MMP11) HSSTROL3 transcripts which are detectable by amplicon as depicted in sequence name HSSTROL3 junc21-26 (SEQ ID NO:370) in normal and cancerous breast tissues

[1414] Expression of Homo sapiens matrix metalloproteinase 11 (stromelysin 3) (MMP11) transcripts detectable by or according to junc21-26-HSSTROL3 junc21-26 (SEQ ID NO:370) amplicon and primers HSSTROL3 junc21-26F (SEQ ID NO:372) and HSSTROL3 junc21-26R (SEQ ID NO:371) was measured by real time PCR. In parallel the expression of four housekeeping genes—PBGD (GenBank Accession No. BC019323 (SEQ ID NO:6); amplicon—PBGD-amplicon (SEQ ID NO:32)), HPRT1 (GenBank Accession No. NM_{—}000194 (SEQ ID NO:5); amplicon—HPRT1-amplicon (SEQ ID NO:35)), SDHA (GenBank Accession No. NM_{—}004168 (SEQ ID NO:4); amplicon—SDHA-amplicon (SEQ ID NO:29)) and G6PD (GenBank Accession No. NM_{—}000402 (SEQ ID NO:8); G6PD amplicon (SEQ ID NO: 44)) was measured similarly. For each RT sample, the expression of the above amplicon was normalized to the geometric mean of the quantities of the housekeeping genes. The normalized quantity of each RT sample was then divided by the median of the quantities of the normal post-mortem (PM) samples (Sample Nos. 56-60, 63-67, Table 6, above, “Tissue samples in breast cancer testing panel”), to obtain a value of fold up-regulation for each sample relative to median of the normal PM samples.

[1415] FIG. 35 is a histogram showing over expression of the above-indicated Homo sapiens matrix metalloproteinase 11 (stromelysin 3) (MMP11) transcripts in cancerous breast samples relative to the normal samples.

[1416] As is evident from FIG. 35, the expression of Homo sapiens matrix metalloproteinase 11 (stromelysin 3) (MMP11) transcripts detectable by the above amplicon in cancer samples was significantly higher than in the non-cancerous samples (Sample Nos. 46-50, 90-93, 96-99 Table 5, “Tissue samples in breast cancer testing panel”). Notably an over-expression of at least 5 fold was found in 24 out of 28 adenocarcinoma samples.

[1417] Statistical analysis was applied to verify the significance of these results, as described below.

[1418] The P value for the difference in the expression levels of Homo sapiens matrix metalloproteinase 11 (stromelysin 3) (MMP11) transcripts detectable by the above amplicon(s) in breast cancer samples versus the normal tissue samples was determined by T test as 6.92E-03.

[1419] Threshold of 5 fold overexpression was found to differentiate between cancer and normal samples with P value of 2.14E-03 as checked by exact fisher test. The above values demonstrate statistical significance of the results.

[1420] By dissecting the patient's population into four age groups (indicated below the graph), we demonstrate that the transcripts detected by the above amplicon are highly expressed mainly in patient with age above 55 and/or patients with an age below 45.

[1421] Primer pairs are also optionally and preferably encompassed within the present invention; for example, for the above experiment, the following primer pair was used as a non-limiting illustrative example only of a suitable primer pair: HSSTROL3 junc21-26F (SEQ ID NO:372) forward primer; and HSSTROL3 junc21-26R (SEQ ID NO:371) reverse primer.

[1422] The present invention also preferably encompasses any amplicon obtained through the use of any suitable primer pair; for example, for the above experiment, the following amplicon was obtained as a non-limiting illustrative example only of a suitable amplicon: HSSTROL3 junc21-26 (SEQ ID NO:370).

[1423] Primers:

| | |
|---|---|
| Forward primer HSSTROL3 junc21-26F: | (SEQ ID NO: 372) |
| TGGCGCCTCCGTGG | |
| Reverse primer HSSTROL3 junc21-26R: | (SEQ ID NO: 371) |
| ACCCAGTACTGAGCACCTTGG | |
| Amplicon HSSTROL3 junc21-26: | (SEQ ID NO: 370) |

TGGCGCCTCCGTGGGGGCCAGCTGCAGCCCGGCTACCCAGCATTGGCCTCTCGCCACTGGCAG
GGACTGCCCAGCCCTGTGGACGCTGCCTTCGAGGATGCCCAGGGCCACATTTGGTTCTTCCAA
GGTGCTCAGTACTGGGT

Expression of Homo sapiens matrix metalloproteinase 11 (stromelysin 3) (MMP11) HSSTROL3 transcripts which are detectable by amplicon as depicted in sequence name HSSTROL3 junc21-26 (SEQ ID NO:370) in normal and cancerous colon tissues:

[1424] Expression of Homo sapiens matrix metalloproteinase 11 (stromelysin 3) (MMP11) transcripts detectable by or according to junc21-26-HSSTROL3 junc21-26 (SEQ ID NO:370) amplicon and primers HSSTROL3 junc21-26F (SEQ ID NO:372) and HSSTROL3 junc21-26R (SEQ ID NO:371) was measured by real time PCR. In parallel the expression of four housekeeping genes—PBGD (GenBank Accession No. BC019323 (SEQ ID NO:6); amplicon—PBGD-amplicon (SEQ ID NO:32)), HPRT1 (GenBank Accession No. NM_{—}000194 (SEQ ID NO:5); amplicon—HPRT1-amplicon (SEQ ID NO:35)), G6PD (GenBank Accession No. NM_{—}000402 (SEQ ID NO:8); G6PD amplicon (SEQ ID NO: 44)) and RPS27A (GenBank Accession No. NM_{—}002954 (SEQ ID NO:1); RPS27A amplicon (SEQ ID NO: 47)), was measured similarly. For each RT sample, the expression of the above amplicon was normalized to the geometric mean of the quantities of the housekeeping genes. The normalized quantity of each RT sample was then divided by the median of the quantities of the normal post-mortem (PM) samples (Sample Nos. 41, 52, 62-67, 69-71, Table 4, above, “Tissue samples in colon cancer testing panel”), to obtain a value of fold up-regulation for each sample relative to median of the normal PM samples.

[1425] FIG. 36 is a histogram showing over expression of the above-indicated Homo sapiens matrix metalloproteinase 11 (stromelysin 3) (MMP11) transcripts in cancerous colon samples relative to the normal samples.

[1426] As is evident from FIG. 36, the expression of Homo sapiens matrix metalloproteinase 11 (stromelysin 3) (MMP11) transcripts detectable by the above amplicon in cancer samples was significantly higher than in the non-cancerous samples (Sample Nos. 41, 52, 62-67, 69-71 Table 3, “Tissue samples in colon cancer testing panel”). Notably an over-expression of at least 5 fold was found in 18 out of 36 adenocarcinoma samples.

[1427] Statistical analysis was applied to verify the significance of these results, as described below.

[1428] The P value for the difference in the expression levels of Homo sapiens matrix metalloproteinase 11 (stromelysin 3) (MMP11) transcripts detectable by the above amplicon(s) in colon cancer samples versus the normal tissue samples was determined by T test as 2.1E-05.

[1429] Threshold of 5 fold overexpression was found to differentiate between cancer and normal samples with P value of 1.99E-03 as checked by exact fisher test. The above values demonstrate statistical significance of the results.

[1430] Primer pairs are also optionally and preferably encompassed within the present invention; for example, for the above experiment, the following primer pair was used as a non-limiting illustrative example only of a suitable primer pair: HSSTROL3 junc21-26F (SEQ ID NO:372) forward primer; and HSSTROL3 junc21-26R (SEQ ID NO:371) reverse primer.

[1431] The present invention also preferably encompasses any amplicon obtained through the use of any suitable primer pair; for example, for the above experiment, the following amplicon was obtained as a non-limiting illustrative example only of a suitable amplicon: HSSTROL3 junc21-26 (SEQ ID NO:370).

[1432] Primers:

| | |
|---|---|
| Forward primer HSSTROL3 junc21-26F: | (SEQ ID NO: 372) |
| TGGCGCCTCCGTGG | |
| Reverse primer HSSTROL3 junc21-26R: | (SEQ ID NO: 371) |
| ACCCAGTACTGAGCACCTTGG | |
| Amplicon HSSTROL3 junc21-26: | (SEQ ID NO: 370) |

TGGCGCCTCCGTGGGGGCCAGCTGCAGCCCGGCTACCCAGCATTGGCCTCTCGCCACTGGCAG
GGACTGCCCAGCCCTGTGGACGCTGCCTTCGAGGATGCCCAGGGCCACATTTGGTTCTTCCAA
GGTGCTCAGTACTGGGT

Expression of Homo sapiens matrix metalloproteinase 11 (stromelysin 3) (MMP11) HSSTROL3 transcripts which are detectable by amplicon as depicted in sequence name HSSTROL3 junc21-26 (SEQ ID NO:370) in normal and cancerous lung tissues:

[1433] Expression of Homo sapiens matrix metalloproteinase 11 (stromelysin 3) (MMP11) transcripts detectable by or according to junc21-26—HSSTROL3 junc21-26 (SEQ ID NO:370) amplicon and primers HSSTROL3 junc21-26F (SEQ ID NO:372) and HSSTROL3 junc21-26R (SEQ ID NO:371) was measured by real time PCR. In parallel the expression of four housekeeping genes—PBGD (GenBank Accession No. BC019323 (SEQ ID NO:6); amplicon—PBGD-amplicon (SEQ ID NO:32)), HPRT1 (GenBank Accession No. NM_{—}000194 (SEQ ID NO:5); amplicon—HPRT1-amplicon (SEQ ID NO:35)), Ubiquitin (GenBank Accession No. BC000449 (SEQ ID NO:9); amplicon—Ubiquitin-amplicon (SEQ ID NO:50)) and SDHA (GenBank Accession No. NM_{—}004168 (SEQ ID NO:4); amplicon—SDHA-amplicon (SEQ ID NO:29)), was measured similarly. For each RT sample, the expression of the above amplicon was normalized to the geometric mean of the quantities of the housekeeping genes. The normalized quantity of each RT sample was then divided by the median of the quantities of the normal post-mortem (PM) samples (Sample Nos. 47-50, 90-93, 96-99, Table 5, above, “Tissue samples in lung cancer testing panel”), to obtain a value of fold up-regulation for each sample relative to median of the normal PM samples.

[1434] FIG. 37 is a histogram showing over expression of the above-indicated Homo sapiens matrix metalloproteinase 11 (stromelysin 3) (MMP11) transcripts in cancerous lung samples relative to the normal samples.

[1435] As is evident from FIG. 37, the expression of Homo sapiens matrix metalloproteinase 11 (stromelysin 3) (MMP11) transcripts detectable by the above amplicon in cancer samples was significantly higher than in the non-cancerous samples (Sample Nos. 46-50, 90-93, 96-99 Table 5, “Tissue samples in lung cancer testing panel”). Notably an over-expression of at least 5 fold was found in 15 out of 15 adenocarcinoma samples, 14 out of 16 squamous cell carcinoma samples, 4 out of 4 large cell carcinoma samples and in 8 out of 8 small cells carcinoma samples.

[1436] Statistical analysis was applied to verify the significance of these results, as described below.

[1437] The P value for the difference in the expression levels of Homo sapiens matrix metalloproteinase 11 (stromelysin 3) (MMP11) transcripts detectable by the above amplicon in lung cancer samples versus the normal tissue samples was determined by T test as 1.16E-04 in adenocarcinoma, 1.18E-03 in squamous cell carcinoma, 1.31E-01 in large cell carcinoma, 1.62E-03 in small cell.

[1438] Threshold of 5 fold overexpression was found to differentiate between cancer and normal samples with P value of 5.75E-08 in adenocarcinoma, 2.99E-06 in squamous cell carcinoma, 5.94E-04 in large cell carcinoma, 1.03E-04 in small cell as checked by exact fisher test. The above values demonstrate statistical significance of the results.

[1439] Primer pairs are also optionally and preferably encompassed within the present invention; for example, for the above experiment, the following primer pair was used as a non-limiting illustrative example only of a suitable primer pair: HSSTROL3 junc21-26F (SEQ ID NO:372) forward primer; and HSSTROL3 junc21-26R (SEQ ID NO:371) reverse primer.

[1440] The present invention also preferably encompasses any amplicon obtained through the use of any suitable primer pair; for example, for the above experiment, the following amplicon was obtained as a non-limiting illustrative example only of a suitable amplicon: HSSTROL3 junc21-26 (SEQ ID NO:370).

[1441] Primers:

| | |
|---|---|
| Forward primer HSSTROL3 junc21-26F: | (SEQ ID NO: 372) |
| TGGCGCCTCCGTGG | |
| Reverse primer HSSTROL3 junc21-26R: | (SEQ ID NO: 371) |
| ACCCAGTACTGAGCACCTTGG | |
| Amplicon HSSTROL3 junc21-26: | (SEQ ID NO: 370) |

TGGCGCCTCCGTGGGGGCCAGCTGCAGCCCGGCTACCCAGCATTGGCCTCTCGCCACTGGCAG
GGACTGCCCAGCCCTGTGGACGCTGCCTTCGAGGATGCCCAGGGCCACATTTGGTTCTTCCAA
GGTGCTCAGTACTGGGT

Expression of Homo sapiens matrix metalloproteinase 11 (stromelysin 3) (MMP11) HSSTROL3 transcripts which are detectable by amplicon as depicted in sequence name HSSTROL3 junc21-26 (SEQ ID NO:370) in different normal tissues:

[1442] Expression of Homo sapiens matrix metalloproteinase 11 (stromelysin 3) (MMP11) transcripts detectable by or according to HSSTROL3 junc21-26 (SEQ ID NO:370) amplicon and primers: HSSTROL3 junc21-26F (SEQ ID NO:372) and HSSTROL3 junc21-26R (SEQ ID NO:371) was measured by real time PCR. In parallel the expression of four housekeeping genes—RPL19 (GenBank Accession No. NM_{—}000981 (SEQ ID NO:7); RPL19 amplicon (SEQ ID NO: 38)), TATA box (GenBank Accession No. NM_{—}003194 (SEQ ID NO:2); TATA amplicon (SEQ ID NO: 53)), Ubiquitin (GenBank Accession No. BC000449 (SEQ ID NO:9); amplicon—Ubiquitin-amplicon (SEQ ID NO:50)) and SDHA (GenBank Accession No. NM_{—}004168 (SEQ ID NO:4); amplicon—SDHA-amplicon (SEQ ID NO:29)) was measured similarly. For each RT sample, the expression of the above amplicon was normalized to the geometric mean of the quantities of the housekeeping genes. The normalized quantity of each RT sample was then divided by the median of the quantities of the colon samples (Sample Nos. 1-3 Table 7, “Tissue samples in normal panel”), to obtain a value of relative expression of each sample relative to median of the colon samples.

[1443] FIG. 38 is a histogram showing expression of Homo sapiens matrix metalloproteinase 11 (stromelysin 3) (MMP11) HSSTROL3 transcripts which are detectable by amplicon as depicted in sequence name HSSTROL3 junc21-26 (SEQ ID NO:370) in different normal tissues.

[1444] Primers:

| | |
|---|---|
| Forward primer HSSTROL3 junc21-26F: | (SEQ ID NO: 372) |
| TGGCGCCTCCGTGG | |
| Reverse primer HSSTROL3 junc21-26R: | (SEQ ID NO: 371) |
| ACCCAGTACTGAGCACCTTGG | |
| Amplicon HSSTROL3 junc21-26: | (SEQ ID NO: 370) |

TGGCGCCTCCGTGGGGGCCAGCTGCAGCCCGGCTACCCAGCATTGGCCTCTCGCCACTGGCAG
GGACTGCCCAGCCCTGTGGACGCTGCCTTCGAGGATGCCCAGGGCCACATTTGGTTCTTCCAA
GGTGCTCAGTACTGGGT

Expression of Homo sapiens matrix metalloproteinase 11 (stromelysin 3) (MMP11) HSSTROL3 transcripts which are detectable by amplicon as depicted in sequence name HSSTROL3 junc21-26 (SEQ ID NO:370) in normal and cancerous ovary tissues

[1445] Expression of Homo sapiens matrix metalloproteinase 11 (stromelysin 3) (MMP11) transcripts detectable by or according to junc21-26—HSSTROL3 junc21-27 (SEQ ID NO:378) amplicon and primers HSSTROL3 junc21-26F (SEQ ID NO:372) and HSSTROL3 junc21-26R (SEQ ID NO:371) was measured by real time PCR. In parallel the expression of four housekeeping genes—PBGD (GenBank Accession No. BC019323 (SEQ ID NO:6); amplicon—PBGD-amplicon (SEQ ID NO:32)), HPRT1 (GenBank Accession No. NM_{—}000194 (SEQ ID NO:5); amplicon—HPRT1-amplicon (SEQ ID NO:35)), SDHA (GenBank Accession No. NM_{—}004168 (SEQ ID NO:4); amplicon—SDHA-amplicon (SEQ ID NO:29)) and GAPDH (GenBank Accession No. BC026907 (SEQ ID NO:3); GAPDH amplicon (SEQ ID NO: 41) was measured similarly. For each RT sample, the expression of the above amplicon was normalized to the geometric mean of the quantities of the housekeeping genes. The normalized quantity of each RT sample was then divided by the median of the quantities of the normal post-mortem (PM) samples (Sample Nos. 45, 46, 48, 71, Table 3, above, “Tissue samples in ovarian cancer testing panel”), to obtain a value of fold up-regulation for each sample relative to median of the normal PM samples.

[1446] FIG. 39 is a histogram showing over expression of the above-indicated Homo sapiens matrix metalloproteinase 11 (stromelysin 3) (MMP11) transcripts in cancerous ovary samples relative to the normal samples.

[1447] As is evident from FIG. 39, the expression of Homo sapiens matrix metalloproteinase 11 (stromelysin 3) (MMP11) transcripts detectable by the above amplicon was higher in a few cancer samples than in the non-cancerous samples (Sample Nos. 45, 46, 48, 71 Table 3 “Tissue samples in ovarian cancer testing panel”). Notably an over-expression of at least 5 fold was found in 4 out of 43 adenocarcinoma samples.

[1448] Primer pairs are also optionally and preferably encompassed within the present invention; for example, for the above experiment, the following primer pair was used as a non-limiting illustrative example only of a suitable primer pair: HSSTROL3 junc21-26F (SEQ ID NO:372) forward primer; and HSSTROL3 junc21-26R (SEQ ID NO:371) reverse primer.

[1449] The present invention also preferably encompasses any amplicon obtained through the use of any suitable primer pair; for example, for the above experiment, the following amplicon was obtained as a non-limiting illustrative example only of a suitable amplicon: HSSTROL3 junc21-26 (SEQ ID NO:370).

[1450] Primers:

| | |
|---|---|
| Forward primer HSSTROL3 junc21-26F: | (SEQ ID NO: 372) |
| TGGCGCCTCCGTGG | |
| Reverse primer HSSTROL3 junc21-26R: | (SEQ ID NO: 371) |
| ACCCAGTACTGAGCACCTTGG | |
| Amplicon HSSTROL3 junc21-26: | (SEQ ID NO: 370) |

TGGCGCCTCCGTGGGGGCCAGCTGCAGCCCGGCTACCCAGCATTGGCCTCTCGCCACTGGCAG
GGACTGCCCAGCCCTGTGGACGCTGCCTTCGAGGATGCCCAGGGCCACATTTGGTTCTTCCAA
GGTGCTCAGTACTGGGT

Expression of Homo sapiens matrix metalloproteinase 11 (stromelysin 3) (MMP11) HSSTROL3 transcripts which are detectable by amplicon as depicted in sequence name HSSTROL3 junc21-27 (SEQ ID NO:378) in normal and cancerous ovary tissues

[1451] Expression of Homo sapiens matrix metalloproteinase 11 (stromelysin 3) (MMP11) transcripts detectable by or according to junc21-27—HSSTROL3 junc21-27 (SEQ ID NO:378) amplicon and primers HSSTROL3 junc21-27F (SEQ ID NO:376) and HSSTROL3 junc21-27R (SEQ ID NO:377) was measured by real time PCR. In parallel the expression of four housekeeping genes—PBGD (GenBank Accession No. BC019323 (SEQ ID NO:6); amplicon—PBGD-amplicon (SEQ ID NO:32)), HPRT1 (GenBank Accession No. NM_{—}000194 (SEQ ID NO:5); amplicon—HPRT1-amplicon (SEQ ID NO:35)), SDHA (GenBank Accession No. NM_{—}004168 (SEQ ID NO:4); amplicon—SDHA-amplicon (SEQ ID NO:29)) and GAPDH (GenBank Accession No. BC026907 (SEQ ID NO:3); GAPDH amplicon (SEQ ID NO: 41) was measured similarly. For each RT sample, the expression of the above amplicon was normalized to the geometric mean of the quantities of the housekeeping genes. The normalized quantity of each RT sample was then divided by the median of the quantities of the normal post-mortem (PM) samples (Sample Nos. 45, 46, 48, 71, Table 3, above, “Tissue samples in ovarian cancer testing panel”), to obtain a value of fold up-regulation for each sample relative to median of the normal PM samples.

[1452] FIG. 40 is a histogram showing over expression of the above-indicated Homo sapiens matrix metalloproteinase 11 (stromelysin 3) (MMP11) transcripts in cancerous ovary samples relative to the normal samples.

[1453] As is evident from FIG. 40, the expression of Homo sapiens matrix metalloproteinase 11 (stromelysin 3) (MMP11) transcripts detectable by the above amplicon was higher in a few cancer samples than in the non-cancerous samples (Sample Nos. 45, 46, 48, 71 Table 3, “Tissue samples in ovarian cancer testing panel”). Notably an over-expression of at least 5 fold was found in 3 out of 43 adenocarcinoma samples.

[1454] Primer pairs are also optionally and preferably encompassed within the present invention; for example, for the above experiment, the following primer pair was used as a non-limiting illustrative example only of a suitable primer pair: HSSTROL3 junc21-27F (SEQ ID NO:376) forward primer; and HSSTROL3 junc21-27R (SEQ ID NO:377) reverse primer.

[1455] The present invention also preferably encompasses any amplicon obtained through the use of any suitable primer pair; for example, for the above experiment, the following amplicon was obtained as a non-limiting illustrative example only of a suitable amplicon: HSSTROL3 junc21-27 (SEQ ID NO:378).

[1456] Primers:

| | |
|---|---|
| Forward primer HSSTROL3 junc21-27F: | (SEQ ID NO: 376) |
| ACATTTGGTTCTTCCAAGGGACTAC | |
| Reverse primer HSSTROL3 junc21-27R: | (SEQ ID NO: 377) |
| TCGATCTCAGAGGGCACCC | |
| Amplicon HSSTROL3 junc21-27: | (SEQ ID NO: 378) |

ACATTTGGTTCTTCCAAGGGACTACTGGCGTTTCCACCCCAGCACCCGGCGTGTAGACAGTCC
CGTGCCCCGCAGGGCCACTGACTGGAGAGGGGTGCCCTCTGAGATCGA

Expression of Stromelysin-3 precursor (SEQ ID NO:363) (EC 3.4.24.-) (Matrix metalloproteinase-11) (MMP-11) (ST3) (SL-3) HSSTROL3 transcripts which are detectable by amplicon as depicted in sequence name HSSTROL3 junc21-27 (SEQ ID NO: 378) in normal and cancerous breast tissues

[1457] Expression of Stromelysin-3 precursor (SEQ ID NO:363) transcripts detectable by or according to junc21-27, HSSTROL3 junc21-27 (SEQ ID NO: 378) amplicon and primers HSSTROL3junc21-27F (SEQ ID NO: 376) and HSSTROL3junc21-27R (SEQ ID NO: 377) was measured by real time PCR (RNA was as for the experiment above). In parallel the expression of four housekeeping genes—PBGD (GenBank Accession No. BC019323 (SEQ ID NO:6); amplicon—PBGD-amplicon (SEQ ID NO:32)), HPRT1 (GenBank Accession No. NM_{—}000194 (SEQ ID NO:5); amplicon—HPRT1-amplicon (SEQ ID NO:35)), SDHA (GenBank Accession No. NM_{—}004168 (SEQ ID NO:4); amplicon—SDHA-amplicon (SEQ ID NO:29)), G6PD (GenBank Accession No. NM_{—}000402 (SEQ ID NO:8); G6PD amplicon (SEQ ID NO: 44)) was measured similarly. For each RT sample, the expression of the above amplicon was normalized to the geometric mean of the quantities of the housekeeping genes. The normalized quantity of each RT sample was then divided by the median of the quantities of the normal post-mortem (PM) samples (Sample Nos. 56-60, 63-67, Table 6, “Tissue samples in breast cancer testing panel”, above), to obtain a value of fold up-regulation for each sample relative to median of the normal PM samples.

[1458] FIG. 41 is a histogram showing over expression of the above-indicated Stromelysin-3 precursor (SEQ ID NO:363) transcripts in cancerous breast samples relative to the normal samples.

[1459] As is evident from FIG. 41, the expression of Stromelysin-3 precursor (SEQ ID NO:363) transcripts detectable by the above amplicon in cancer samples was significantly higher than in the non-cancerous samples (Sample Nos. 56-60, 63-67 Table 6, “Tissue samples in breast cancer testing panel”, above). Notably an over-expression of at least 20 fold was found in 21 out of 28 adenocarcinoma samples.

[1460] Statistical analysis was applied to verify the significance of these results, as described below.

[1461] The P value for the difference in the expression levels of Stromelysin-3 precursor (SEQ ID NO:363) transcripts detectable by the above amplicon in breast cancer samples versus the normal tissue samples was determined by T test as 5.98E-03.

[1462] Threshold of 20 fold overexpression was found to differentiate between cancer and normal samples with P value of 3.66E-03 as checked by exact fisher test. The above values demonstrate statistical significance of the results.

[1463] By dissecting the patient's population into four age groups (indicated below the graph), we demonstrate that the transcripts detected by the above amplicon are highly expressed mainly in patient with age above 55 and/or patients with an age below 45.

[1464] Primer pairs are also optionally and preferably encompassed within the present invention; for example, for the above experiment, the following primer pair was used as a non-limiting illustrative example only of a suitable primer pair: HSSTROL3 junc21-27F (SEQ ID NO:376) forward primer; and HSSTROL3 junc21-27R (SEQ ID NO:377) reverse primer.

[1465] The present invention also preferably encompasses any amplicon obtained through the use of any suitable primer pair; for example, for the above experiment, the following amplicon was obtained as a non-limiting illustrative example only of a suitable amplicon: HSSTROL3 junc21-27 (SEQ ID NO:378).

| | |
|---|---|
| Forward primer HSSTROL3 junc21-27F: | (SEQ ID NO: 376) |
| ACATTTGGTTCTTCCAAGGGACTAC | |
| Reverse primer HSSTROL3 junc21-27R | (SEQ ID NO:377) |
| TCGATCTCAGAGGGCACCC | |
| Amplicon HSSTROL3 junc21-27: | (SEQ ID NO: 378) |

ACATTTGGTTCTTCCAAGGGACTACTGGCGTTTCCACCCCAGCACCCGGCGTGTAGAC
AGTCCCGTGCCCCGCAGGGCCACTGACTGGAGAGGGGTGCCCTCTGAGATCGA

Expression of Homo sapiens matrix metalloproteinase 11 (stromelysin 3) (MMP11) HSSTROL3 transcripts which are detectable by amplicon as depicted in sequence name HSSTROL3 junc21-27 (SEQ ID NO: 378) in normal and cancerous colon tissues

[1466] Expression of Homo sapiens matrix metalloproteinase 11 (stromelysin 3) (MMP11) transcripts detectable by or according to junc21-27, HSSTROL3 junc21-27 (SEQ ID NO: 378) amplicon and primers HSSTROL3 junc21-27F (SEQ ID NO: 376) and HSSTROL3 junc21-27R (SEQ ID NO: 377) was measured by real time PCR. In parallel the expression of four housekeeping genes—PBGD (GenBank Accession No. BC019323 (SEQ ID NO:6); amplicon—PBGD-amplicon (SEQ ID NO:32), HPRT1 (GenBank Accession No. NM_{—}000194 (SEQ ID NO:5); amplicon—HPRT1-amplicon (SEQ ID NO:35), G6PD (GenBank Accession No. NM_{—}000402 (SEQ ID NO:8); G6PD-amplicon (SEQ ID NO: 44)), RPS27A (GenBank Accession No. NM_{—}002954 (SEQ ID NO:1); RPS27A amplicon (SEQ ID NO: 47)), was measured similarly. For each RT sample, the expression of the above amplicon was normalized to the geometric mean of the quantities of the housekeeping genes. The normalized quantity of each RT sample was then divided by the median of the quantities of the normal post-mortem (PM) samples (Sample Nos. 41, 52, 62-67, 69-71, Table 4, above, “Tissue samples in colon cancer testing panel”), to obtain a value of fold up-regulation for each sample relative to median of the normal PM samples.

[1467] FIG. 42 is a histogram showing over expression of the above-indicated Homo sapiens matrix metalloproteinase 11 (stromelysin 3) (MMP11) transcripts in cancerous colon samples relative to the normal samples.

[1468] As is evident from FIG. 42, the expression of Homo sapiens matrix metalloproteinase 11 (stromelysin 3) (MMP11) transcripts detectable by the above amplicon in cancer samples was higher than in the non-cancerous samples (Sample Nos. 41, 52, 62-67, 69-71 Table 4, “Tissue samples in colon cancer testing panel”). Notably an over-expression of at least 6 fold was found in 14 out of 36 adenocarcinoma samples.

[1469] Primer pairs are also optionally and preferably encompassed within the present invention; for example, for the above experiment, the following primer pair was used as a non-limiting illustrative example only of a suitable primer pair: HSSTROL3 junc21-27F (SEQ ID NO: 376) forward primer; and HSSTROL3 junc21-27R (SEQ ID NO: 377) reverse primer.

[1470] The present invention also preferably encompasses any amplicon obtained through the use of any suitable primer pair; for example, for the above experiment, the following amplicon was obtained as a non-limiting illustrative example only of a suitable amplicon: HSSTROL3 junc21-27 (SEQ ID NO: 378).

[1471] Primers:

Forward primer HSSTROL3 junc21-27F
(SEQ ID NO:376):
ACATTTGGTTCTTCCAAGGGACTAC
Reverse primer HSSTROL3 junc21-27R
(SEQ ID NO:377):
TCGATCTCAGAGGGCACCC
Amplicon HSSTROL3 junc21-27 (SEQ ID NO:378):
ACATTTGGTTCTTCCAAGGGACTACTGGCGTTTCCACCCCAGCACCCGGC
GTGTAGACAGTCCCGTGCCCCGCAGGGCCACTGACTGGAGAGGGGTGCCC
TCTGAGATCGA

Expression of Homo sapiens matrix metalloproteinase 11 (stromelysin 3) (MMP11) HSSTROL3 transcripts which are detectable by amplicon as depicted in sequence name HSSTROL3 junc21-27 (SEQ ID NO: 378) in normal and cancerous lung tissues

[1472] Expression of Homo sapiens matrix metalloproteinase 11 (stromelysin 3) (MMP11) transcripts detectable by or according to junc21-27, HSSTROL3 junc21-27 (SEQ ID NO: 378) amplicon and primers HSSTROL3 junc21-27F (SEQ ID NO: 376) and HSSTROL3 junc21-27R (SEQ ID NO: 377) was measured by real time PCR. In parallel the expression of four housekeeping genes—PBGD (GenBank Accession No. BC019323 (SEQ ID NO:6); amplicon—PBGD-amplicon (SEQ ID NO:32),), HPRT1 (GenBank Accession No. NM_{—}000194 (SEQ ID NO:5); amplicon—HPRT1-amplicon (SEQ ID NO:35), Ubiquitin (GenBank Accession No. BC000449 (SEQ ID NO:9); amplicon—Ubiquitin-amplicon (SEQ ID NO:50),) and SDHA (GenBank Accession No. NM_{—}004168 (SEQ ID NO:4); amplicon—SDHA-amplicon (SEQ ID NO:29),), was measured similarly. For each RT sample, the expression of the above amplicon was normalized to the geometric mean of the quantities of the housekeeping genes. The normalized quantity of each RT sample was then divided by the median of the quantities of the normal post-mortem (PM) samples (Sample Nos. 47-50, 90-93, 96-99, Table 5, above, “Tissue samples in lung cancer testing panel”), to obtain a value of fold up-regulation for each sample relative to median of the normal PM samples.

[1473] FIG. 43 is a histogram showing over expression of the above-indicated Homo sapiens matrix metalloproteinase 11 (stromelysin 3) (MMP11) transcripts in cancerous lung samples relative to the normal samples.

[1474] As is evident from FIG. 43, the expression of Homo sapiens matrix metalloproteinase 11 (stromelysin 3) (MMP11) transcripts detectable by the above amplicon in cancer samples was significantly higher than in the non-cancerous samples (Sample Nos. 46-50, 90-93, 96-99 Table 5, “Tissue samples in lung cancer testing panel”). Notably an over-expression of at least 10 fold was found in 15 out of 15 adenocarcinoma samples, 13 out of 16 squamous cell carcinoma samples, 3 out of 4 large cell carcinoma samples and in 5 out of 8 small cells carcinoma samples.

[1475] Primer pairs are also optionally and preferably encompassed within the present invention; for example, for the above experiment, the following primer pair was used as a non-limiting illustrative example only of a suitable primer pair: HSSTROL3 junc21-27F (SEQ ID NO: 376) forward primer; and HSSTROL3 junc21-27R (SEQ ID NO: 377) reverse primer.

[1476] The present invention also preferably encompasses any amplicon obtained through the use of any suitable primer pair; for example, for the above experiment, the following amplicon was obtained as a non-limiting illustrative example only of a suitable amplicon: HSSTROL3 junc21-27 (SEQ ID NO: 378).

[1477] Primers:

Forward primer HSSTROL3 junc21-27F
(SEQ ID NO:376):
ACATTTGGTTCTTCCAAGGGACTAC
Reverse primer HSSTROL3 junc21-27R
(SEQ ID NO:377):
TCGATCTCAGAGGGCACCC
Amplicon HSSTROL3 junc21-27 (SEQ ID NO:378):
ACATTTGGTTCTTCCAAGGGACTACTGGCGTTTCCACCCCAGCACCCGGC
GTGTAGACAGTCCCGTGCCCCGCAGGGCCACTGACTGGAGAGGGGTGCCC
TCTGAGATCGA

Expression of Stromelysin-3 precursor (SEQ ID NO:363) (EC 3.4.24.-) (Matrix metalloproteinase-11) (MMP-11) (ST3) (SL-3)HSSTROL3 transcripts which are detectable by amplicon as depicted in sequence name HSSTROL3 junc21-27 (SEQ ID NO: 378) in different normal tissues

[1478] Expression of Stromelysin-3 precursor (SEQ ID NO:363) (EC 3.4.24.-) (Matrix metalloproteinase-11) (MMP-11) (ST3) (SL-3) transcripts detectable by or according to HSSTROL3 junc21-27 (SEQ ID NO: 378) amplicon and HSSTROL3 junc21-27 F (SEQ ID NO: 376) and HSSTROL3 junc21-27 R (SEQ ID NO: 377) was measured by real time PCR. In parallel the expression of four housekeeping genes UBC (GenBank Accession No. BC000449 (SEQ ID NO:9); amplicon—Ubiquitin-amplicon (SEQ ID NO:50)) and SDHA (GenBank Accession No. NM_{—}004168 (SEQ ID NO:4); amplicon—SDHA-amplicon (SEQ ID NO:29)), RPL19 (GenBank Accession No. NM_{—}000981 (SEQ ID NO:7); RPL19 amplicon (SEQ ID NO: 38)), TATA box (GenBank Accession No. NM_{—}003194 (SEQ ID NO:2); TATA amplicon (SEQ ID NO: 53)) was measured similarly. For each RT sample, the expression of the above amplicon was normalized to the geometric mean of the quantities of the housekeeping genes. The normalized quantity of each RT sample was then divided by the median of the quantities of the breast samples (sample Nos. 33-35 Table 7, “Tissue samples in normal panel”), to obtain a value of relative expression of each sample relative to median of the breast samples.

[1479] The results are presented in FIG. 44, demonstrating the expression of Stromelysin-3 precursor (SEQ ID NO:363) (EC 3.4.24.-) (Matrix metalloproteinase-11) (MMP-11) (ST3) (SL-3) HSSTROL3 transcripts, which are detectable by amplicon as depicted in sequence name HSSTROL3 junc21-27 (SEQ ID NO: 378), in different normal tissues.

[1480] Primers:

Forward primer HSSTROL3 junc21-27F
(SEQ ID NO:376):
ACATTTGGTTCTTCCAAGGGACTAC
Reverse primer HSSTROL3 junc21-27R
(SEQ ID NO:377):
TCGATCTCAGAGGGCACCC
Amplicon HSSTROL3 junc21-27 (SEQ ID NO:378):
ACATTTGGTTCTTCCAAGGGACTACTGGCGTTTCCACCCCAGCACCCGGC
GTGTAGACAGTCCCGTGCCCCGCAGGGCCACTGACTGGAGAGGGGTGCCC
TCTGAGATCGA

Expression of Homo sapiens matrix metalloproteinase 11 (stromelysin 3) (MMP11) HSSTROL3 transcripts which are detectable by amplicon as depicted in sequence name HSSTROL3 seg20-21 (SEQ ID NO:381) in normal and cancerous colon tissues

[1481] Expression of Homo sapiens matrix metalloproteinase 11 (stromelysin 3) (MMP11) transcripts detectable by or according to seg20-21 HSSTROL3 seg20-21 (SEQ ID NO:381) amplicon and primers HSSTROL3 seg20-21F (SEQ ID NO:379) and HSSTROL3 seg20-21R (SEQ ID NO:380) was measured by real time PCR. In parallel the expression of four housekeeping genes—PBGD (GenBank Accession No. BC019323 (SEQ ID NO:6); amplicon—PBGD-amplicon (SEQ ID NO:32)), HPRT1 (GenBank Accession No. NM_{—}000194 (SEQ ID NO:5); amplicon—HPRT1-amplicon (SEQ ID NO:35)), G6PD (GenBank Accession No. NM_{—}000402 (SEQ ID NO:8); G6PD amplicon (SEQ ID NO: 44)) and RPS27A (GenBank Accession No. NM_{—}002954 (SEQ ID NO:1); RPS27A amplicon (SEQ ID NO: 47)) was measured similarly. For each RT sample, the expression of the above amplicon was normalized to the geometric mean of the quantities of the housekeeping genes. The normalized quantity of each RT sample was then divided by the median of the quantities of the normal post-mortem (PM) samples (Sample Nos. 41, 52, 62-67, 69-71, Table 4, above, “Tissue samples in colon cancer testing panel”), to obtain a value of fold up-regulation for each sample relative to median of the normal PM samples.

[1482] FIG. 45 is a histogram showing over expression of the above-indicated Homo sapiens matrix metalloproteinase 11 (stromelysin 3) (MMP11) transcripts in cancerous colon samples relative to the normal samples.

[1483] As is evident from FIG. 45, the expression of Homo sapiens matrix metalloproteinase 11 (stromelysin 3) (MMP11) transcripts detectable by the above amplicon was higher in a few cancer samples than in the non-cancerous samples (Sample Nos. 41, 52, 62-67, 69-71 Table 4, “Tissue samples in colon cancer testing panel”). Notably an over-expression of at least 5 fold was found in 8 out of 36 adenocarcinoma samples.

[1484] Primer pairs are also optionally and preferably encompassed within the present invention; for example, for the above experiment, the following primer pair was used as a non-limiting illustrative example only of a suitable primer pair: HSSTROL3 seg20-21F (SEQ ID NO:379) forward primer; and HSSTROL3 seg20-21R (SEQ ID NO:380) reverse primer.

[1485] The present invention also preferably encompasses any amplicon obtained through the use of any suitable primer pair; for example, for the above experiment, the following amplicon was obtained as a non-limiting illustrative example only of a suitable amplicon: HSSTROL3 seg20-21 (SEQ ID NO:381).

[1486] Primers:

Forward primer HSSTROL3 seg20-21F
(SEQ ID NO:379):
TCTGCTGGCCACTGTGACTG
Reverse primer HSSTROL3 seg20-21R
(SEQ ID NO:380):
GAAGAAAAAGAGCTCGCCTCG
Amplicon HSSTROL3 seg20-21 (SEQ ID NO:381):
TCTGCTGGCCACTGTGACTGCAGCATATGCCCTCAGCATGTGTCCCTCTC
TCCCACCCCAGCCAGACGCCCCGCCAGATGCCTGTGAGGCCTCCTTTGAC
GCGGTCTCCACCATCCGAGGCGAGCTCTTTTTCTTC

Expression of Homo sapiens matrix metalloproteinase 11 (stromelysin 3) (MMP11) HSSTROL3 transcripts which are detectable by amplicon as depicted in sequence name HSSTROL3 seg20-21 (SEQ ID NO: 381) in normal and cancerous ovary tissues

[1487] Expression of Homo sapiens matrix metalloproteinase 11 (stromelysin 3) (MMP11) transcripts detectable by or according to seg20-21—HSSTROL3 seg20-21 (SEQ ID NO: 381) amplicon and primers HSSTROL3 seg20-21F (SEQ ID NO:379) and HSSTROL3 seg20-21R (SEQ ID NO: 380) was measured by real time PCR. In parallel the expression of four housekeeping genes—PBGD (GenBank Accession No. BC019323 (SEQ ID NO:6); amplicon—PBGD-amplicon (SEQ ID NO:32)), HPRT1 (GenBank Accession No. NM_{—}000194 (SEQ ID NO:5); amplicon—HPRT1-amplicon (SEQ ID NO:35)), SDHA (GenBank Accession No. NM_{—}004168 (SEQ ID NO:4); amplicon—SDHA-amplicon (SEQ ID NO:29)) and GAPDH (GenBank Accession No. BC026907 (SEQ ID NO:3); GAPDH amplicon (SEQ ID NO: 41) was measured similarly. For each RT sample, the expression of the above amplicon was normalized to the geometric mean of the quantities of the housekeeping genes. The normalized quantity of each RT sample was then divided by the median of the quantities of the normal post-mortem (PM) samples (Sample Nos. 45, 46, 48, 71, Table 3, above, “Tissue samples in ovarian cancer testing panel”), to obtain a value of fold up-regulation for each sample relative to median of the normal PM samples.

[1488] FIG. 46 is a histogram showing over expression of the above-indicated Homo sapiens matrix metalloproteinase 11 (stromelysin 3) (MMP11) transcripts in cancerous ovary samples relative to the normal samples.

[1489] As is evident from FIG. 46 the expression of Homo sapiens matrix metalloproteinase 11 (stromelysin 3) (MMP11) transcripts detectable by the above amplicon was higher in a few cancer samples than in the non-cancerous samples (Sample Nos. 45, 46, 48, 71 Table 3, “Tissue samples in ovarian cancer testing panel”). Notably an over-expression of at least 5 fold was found in 4 out of 43 adenocarcinoma samples.

[1490] Primer pairs are also optionally and preferably encompassed within the present invention; for example, for the above experiment, the following primer pair was used as a non-limiting illustrative example only of a suitable primer pair: HSSTROL3 seg20-21F (SEQ ID NO: 379) forward primer; and HSSTROL seg20-21R (SEQ ID NO: 380) reverse primer.

[1491] The present invention also preferably encompasses any amplicon obtained through the use of any suitable primer pair; for example, for the above experiment, the following amplicon was obtained as a non-limiting illustrative example only of a suitable amplicon: HSSTROL seg20-21 (SEQ ID NO: 381).

[1492] Primers:

Forward primer HSSTROL seg20-21F
(SEQ ID NO:379):
TCTGCTGGCCACTGTGACTG
Reverse primer HSSTROL seg20-21R
(SEQ ID NO:380):
GAAGAAAAAGAGCTCGCCTCG
Amplicon HSSTROL seg20-21 (SEQ ID NO:381):
TCTGCTGGCCACTGTGACTGCAGCATATGCCCTCAGCATGTGTCCCTCTC
TCCCACCCCAGCCAGACGCCCCGCCAGATGCCTGTGAGGCCTCCTTTGAC
GCGGTCTCCACCATCCGAGGCGAGCTCTTTTTCTTC

Expression of Stromelysin-3 precursor (SEQ ID NO:363) (EC 3.4.24.) (Matrix metalloproteinase-11) (MMP-11) (ST3) (SL-3HSSTROL3) transcripts which are detectable by amplicon as depicted in sequence name HSSTROL3 seg20-21 (SEQ ID NO:381) in normal and cancerous Prostate tissues

[1493] Expression of Stromelysin-3 precursor (SEQ ID NO:363) (EC 3.4.24.-) (Matrix metalloproteinase-11) (MMP-11) (ST3) (SL-3) transcripts detectable by or according to seg20-21, HSSTROL3 seg20-21 (SEQ ID NO:381) amplicon and HSSTROL3 seg20-21F (SEQ ID NO:379) and HSSTROL3 seg20-21R (SEQ ID NO:380) primers was measured by real time PCR. In parallel the expression of four housekeeping genes—PBGD (GenBank Accession No. BC019323 (SEQ ID NO:6); amplicon—PBGD-amplicon (SEQ ID NO:32)), HPRT1 (GenBank Accession No. NM_{—}000194 (SEQ ID NO:5); amplicon—HPRT1-amplicon (SEQ ID NO:35)), SDHA (GenBank Accession No. NM_{—}004168 (SEQ ID NO:4); amplicon—SDHA-amplicon (SEQ ID NO:29)), and RPL19 (GenBank Accession No. NM_{—}000981 (SEQ ID NO:7); RPL19 amplicon (SEQ ID NO: 38)) was measured similarly. For each RT sample, the expression of the above amplicon was normalized to the geometric mean of the quantities of the housekeeping genes. The normalized quantity of each RT sample was then divided by the median of the quantities of the normal post-mortem (PM) samples (Sample Nos. 42, 48-53, 59-63, Table 2, “Tissue samples in prostate cancer testing panel”, above), to obtain a value of fold up-regulation for each sample relative to median of the normal PM samples.

[1494] FIG. 47 is a histogram showing over expression of the above-indicated Stromelysin-3 precursor (SEQ ID NO:363) transcripts in cancerous Prostate samples relative to the normal samples. Values represent the average of duplicate experiments.

[1495] As is evident from FIG. 47, the expression of Stromelysin-3 precursor (SEQ ID NO:363) transcripts detectable by the above amplicon in cancer samples was higher than in several non-cancerous samples (Sample Nos. 42, 48-53, 59-63, Table 2, “Tissue samples in prostate cancer testing panel”). Notably an over-expression of at least 5 fold was found in 8 out of 19 adenocarcinoma samples.

[1496] Primer pairs are also optionally and preferably encompassed within the present invention; for example, for the above experiment, the following primer pair was used as a non-limiting illustrative example only of a suitable primer pair: HSSTROL3 seg20-21F (SEQ ID NO:379) forward primer; and HSSTROL3 seg20-21R (SEQ ID NO:380) reverse primer.

[1497] The present invention also preferably encompasses any amplicon obtained through the use of any suitable primer pair; for example, for the above experiment, the following amplicon was obtained as a non-limiting illustrative example only of a suitable amplicon: HSSTROL3 seg20-21 (SEQ ID NO: 381).

Forward primer HSSTROL3 seg20-21F
(SEQ ID NO:379):
TCTGCTGGCCACTGTGACTG
Reverse primer HSSTROL3 seg20-21R
(SEQ ID NO:380):
GAAGAAAAAGAGCTCGCCTCG
Amplicon HSSTROL3 seg20-21 (SEQ ID NO:381):
TCTGCTGGCCACTGTGACTGCAGCATATGCCCTCAGCATGTGTCCCTCTC
TCCCACCCCAGCCAGACGCCCCGCCAGATGCCTGTGAGGCCTCCTTTGAC
GCGGTCTCCACCATCCGAGGCGAGCTCTTTTTCTTC

Expression of Homo sapiens matrix metalloproteinase 11 (stromelysin 3) (MMP11) HSSTROL3 transcripts which are detectable by amplicon as depicted in sequence name HSSTROL3 seg20-21 (SEQ ID NO:381) in normal and cancerous lung tissues

[1498] Expression of Homo sapiens matrix metalloproteinase 11 (stromelysin 3) (MMP11) transcripts detectable by or according to seg20-21, HSSTROL3 seg20-21 (SEQ ID NO:381) amplicon and primers HSSTROL3 seg20-21F (SEQ ID NO:379) and HSSTROL3 seg20-21R (SEQ ID NO:380) was measured by real time PCR. In parallel the expression of four housekeeping genes—PBGD (GenBank Accession No. BC019323 (SEQ ID NO:6); amplicon—PBGD-amplicon (SEQ ID NO:32)), HPRT1 (GenBank Accession No. NM_{—}000194 (SEQ ID NO:5); amplicon—HPRT1-amplicon (SEQ ID NO:35)), Ubiquitin (GenBank Accession No. BC000449 (SEQ ID NO:9); amplicon—Ubiquitin-amplicon (SEQ ID NO:50)) and SDHA (GenBank Accession No. NM_{—}004168 (SEQ ID NO:4); amplicon—SDHA-amplicon (SEQ ID NO:29)), was measured similarly. For each RT sample, the expression of the above amplicon was normalized to the geometric mean of the quantities of the housekeeping genes. The normalized quantity of each RT sample was then divided by the median of the quantities of the normal post-mortem (PM) samples (Sample Nos. 47-50, 90-93, 96-99, Table 5, above, “Tissue samples in lung cancer testing panel”), to obtain a value of fold up-regulation for each sample relative to median of the normal PM samples.

[1499] FIG. 48 is a histogram showing over expression of the above-indicated Homo sapiens matrix metalloproteinase 11 (stromelysin 3) (MMP11) transcripts in cancerous lung samples relative to the normal samples.

[1500] As is evident from FIG. 48, the expression of Homo sapiens matrix metalloproteinase 11 (stromelysin 3) (MMP11) transcripts detectable by the above amplicon in cancer samples was significantly higher than in the non-cancerous samples (Sample Nos. 46-50, 90-93, 96-99 Table 5, above, “Tissue samples in lung cancer testing panel”). Notably an over-expression of at least 6 fold was found in 11 out of 15 adenocarcinoma samples, 6 out of 16 squamous cell carcinoma samples, 1 out of 4 large cell carcinoma samples and in 6 out of 8 small cells carcinoma samples.

[1501] Primer pairs are also optionally and preferably encompassed within the present invention; for example, for the above experiment, the following primer pair was used as a non-limiting illustrative example only of a suitable primer pair: HSSTROL3 seg20-21F (SEQ ID NO:379) forward primer; and HSSTROL3 seg20-21R (SEQ ID NO:380) reverse primer.

[1502] The present invention also preferably encompasses any amplicon obtained through the use of any suitable primer pair; for example, for the above experiment, the following amplicon was obtained as a non-limiting illustrative example only of a suitable amplicon: HSSTROL3 seg20-21 (SEQ ID NO:381).

[1503] Primers:

Forward primer HSSTROL3 seg20-21F
(SEQ ID NO:379):
TCTGCTGGCCACTGTGACTG
Reverse primer HSSTROL3 seg20-21R
(SEQ ID NO:380):
GAAGAAAAAGAGCTCGCCTCG
Amplicon HSSTROL3 seg20-21 (SEQ ID NO:381):
TCTGCTGGCCACTGTGACTGCAGCATATGCCCTCAGCATGTGTCCCTCTC
TCCCACCCCAGCCAGACGCCCCGCCAGATGCCTGTGAGGCCTCCTTTGAC
GCGGTCTCCACCATCCGAGGCGAGCTC

Expression of Stromelysin-3 precursor (SEQ ID NO:363) (EC 3.4.24.-) (Matrix metalloproteinase-11) (MMP-11) (ST3) (SL-3) HSSTROL3 transcripts which are detectable by amplicon as depicted in sequence name HSSTROL3 junc20-21 in normal and cancerous breast tissues

[1504] Expression of Stromelysin-3 precursor (SEQ ID NO:363) transcripts detectable by or according to junc20-21, HSSTROL3junc20-21 (SEQ ID NO:698) amplicon and primers HSSTROL3junc20-21F (SEQ ID NO:699) and HSSTROL3junc20-21R (SEQ ID NO:670) was measured by real time PCR. In parallel the expression of four housekeeping genes—PBGD (GenBank Accession No. BC019323 (SEQ ID NO:6); amplicon—PBGD-amplicon (SEQ ID NO:32)), HPRT1 (GenBank Accession No. NM_{—}000194 (SEQ ID NO:5); amplicon—HPRT1-amplicon (SEQ ID NO:35)), SDHA (GenBank Accession No. NM_{—}004168 (SEQ ID NO:4); amplicon—SDHA-amplicon (SEQ ID NO:29)), G6PD (GenBank Accession No. NM_{—}000402 (SEQ ID NO:8); G6PD amplicon (SEQ ID NO: 44)) was measured similarly. For each RT sample, the expression of the above amplicon was normalized to the geometric mean of the quantities of the housekeeping genes. The normalized quantity of each RT sample was then divided by the median of the quantities of the normal post-mortem (PM) samples (Sample Nos. 56-60, 63-67, Table 6, “Tissue samples in breast cancer testing panel”, above), to obtain a value of fold up-regulation for each sample relative to median of the normal PM samples.

[1505] FIG. 49 is a histogram showing over expression of the above-indicated Stromelysin-3 precursor (SEQ ID NO:363) transcripts in cancerous breast samples relative to the normal samples.

[1506] As is evident from FIG. 49, the expression of Stromelysin-3 precursor (SEQ ID NO:363) transcripts detectable by the above amplicon in cancer samples was significantly higher than in the non-cancerous samples (Sample Nos. 56-60, 63-67, Table 6, “Tissue samples in breast cancer testing panel”). Notably an over-expression of at least 5 fold was found in 13 out of 28 adenocarcinoma samples.

[1507] Statistical analysis was applied to verify the significance of these results, as described below.

[1508] The P value for the difference in the expression levels of Stromelysin-3 precursor (SEQ ID NO:363) transcripts detectable by the above amplicon in breast cancer samples versus the normal tissue samples was determined by T test as 1.28E-02.

[1509] Threshold of 5 fold overexpression was found to differentiate between cancer and normal samples with P value of 4.26E-02 as checked by exact fisher test. The above values demonstrate statistical significance of the results.

[1510] By dissecting the patient's population into four age groups (indicated below the graph), we demonstrate that the transcripts detected by the above amplicon are highly expressed mainly in patients with age above 55 and/or patients with an age below 45.

[1511] Primer pairs are also optionally and preferably encompassed within the present invention; for example, for the above experiment, the following primer pair was used as a non-limiting illustrative example only of a suitable primer pair: HSSTROL3junc20-21F (SEQ ID NO:699) forward primer; and HSSTROL3junc20-21R (SEQ ID NO:670) reverse primer.

[1512] The present invention also preferably encompasses any amplicon obtained through the use of any suitable primer pair; for example, for the above experiment, the following amplicon was obtained as a non-limiting illustrative example only of a suitable amplicon: HSSTROL3 junc20-21 (SEQ ID NO:698).

Forward primer HSSTROL3 junc20-21F
(SEQ ID NO:699):
TCTGCTGGCCACTGTGACTG
Reverse primer HSSTROL3 junc20-21R
(SEQ ID NO:670):
GAAGAAAAAGAGCTCGCCTCG
Amplicon HSSTROL3junc20-21 (SEQ ID NO:698):
TCTGCTGGCCACTGTGACTGCAGCATATGCCCTCAGCATGTGTCCCTCTC
TCCCACCCCAGCCAGACGCCCCGCCAGATGCCTGTGAGGCCTCCTTTGAC
GCGGTCTCCACCATCCGAGGCGAGCTCTTTTTCTTC

Expression of Homo sapiens matrix metalloproteinase 11 (stromelysin 3) (MMP11) HSSTROL3 transcripts which are detectable by amplicon as depicted in sequence name HSSTROL3 seg24 (SEQ ID NO:384) in normal and cancerous ovary tissues

[1513] Expression of Homo sapiens matrix metalloproteinase 11 (stromelysin 3) (MMP11) transcripts detectable by or according to seg24, HSSTROL3 seg24 (SEQ ID NO:384) amplicon and primers HSSTROL3 seg24F (SEQ ID NO:382) and HSSTROL3 seg24R (SEQ ID NO:383) was measured by real time PCR. In parallel the expression of four housekeeping genes—PBGD (GenBank Accession No. BC019323 (SEQ ID NO:6); amplicon—PBGD-amplicon (SEQ ID NO:32)), HPRT1 (GenBank Accession No. NM_{—}000194 (SEQ ID NO:5); amplicon—HPRT1-amplicon (SEQ ID NO:35)), SDHA (GenBank Accession No. NM_{—}004168 (SEQ ID NO:4); amplicon—SDHA-amplicon (SEQ ID NO:29)) and GAPDH (GenBank Accession No. BC026907 (SEQ ID NO:3); GAPDH amplicon (SEQ ID NO: 41) was measured similarly. For each RT sample, the expression of the above amplicon was normalized to the geometric mean of the quantities of the housekeeping genes. The normalized quantity of each RT sample was then divided by the median of the quantities of the normal post-mortem (PM) samples (Sample Nos. 45, 46, 48, 71, Table 3, above, “Tissue samples in ovarian cancer testing panel”), to obtain a value of fold differential expression for each sample relative to median of the normal PM samples.

[1514] In one experiment that was carried out no differential expression in the cancerous samples relative to the normal PM samples was observed.

[1515] Primer pairs are also optionally and preferably encompassed within the present invention; for example, for the above experiment, the following primer pair was used as a non-limiting illustrative example only of a suitable primer pair: HSSTROL3 seg24F (SEQ ID NO:382) forward primer; and HSSTROL3 seg24R (SEQ ID NO:383) reverse primer.

[1516] The present invention also preferably encompasses any amplicon obtained through the use of any suitable primer pair; for example, for the above experiment, the following amplicon was obtained as a non-limiting illustrative example only of a suitable amplicon: HSSTROL3 seg24 (SEQ ID NO:384).

[1517] Primers:

Forward primer HSSTROL3 seg24F (SEQ ID NO:382):
ATTTCCATCCTCAACTGGCAGA
Reverse primer HSSTROL3 seg24R (SEQ ID NO:383):
TGCCCTGGAACCCACG
Amplicon HSSTROL3 seg24 (SEQ ID NO:384):
ATTTCCATCCTCAACTGGCAGAGATGAGAGCCTGGAGCATTGCAGATGCC
AGGGACTTCACAAATGAAGGCACAGCATGGGAAACCTGCGTGGGTTCCAG
GGCA

Expression of Stromelysin-3 precursor (SEQ ID NO:363) (EC 3.4.24.-) (Matrix metalloproteinase-11) (MMP-11) (ST3) SL-3 HSSTROL3 transcripts which are detectable by amplicon as depicted in sequence name HSSTROL3 seg24 (SEQ ID NO:384) in normal and cancerous breast tissues

[1518] Expression of Stromelysin-3 precursor (SEQ ID NO:363) (EC 3.4.24.-) (Matrix metalloproteinase-11) (MMP-1) (ST3) (SL-3 transcripts detectable by or according to seg24 HSSTROL3 seg24 (SEQ ID NO:384) amplicon) and HSSTROL3 seg24F (SEQ ID NO:382) and HSSTROL3 seg24R (SEQ ID NO:383) primers was measured by real time PCR. In parallel the expression of four housekeeping genes PBGD (GenBank Accession No. BC019323 (SEQ ID NO:6); amplicon—PBGD-amplicon (SEQ ID NO:32)), HPRT1 (GenBank Accession No. NM_{—}000194 (SEQ ID NO:5); amplicon—HPRT1-amplicon (SEQ ID NO:35)) SDHA (GenBank Accession No. NM_{—}004168 (SEQ ID NO:4); amplicon—SDHA-amplicon (SEQ ID NO:29)) and G6PD (GenBank Accession No. NM_{—}000402 (SEQ ID NO:8); G6PD amplicon (SEQ ID NO: 44)) was measured similarly. For each RT sample, the expression of the above amplicon was normalized to the geometric mean of the quantities of the housekeeping genes. The normalized quantity of each RT sample was then divided by the median of the quantities of the normal post-mortem (PM) samples (Sample Nos. 56-60, 63-67, Table 6, above, “Tissue samples inbreast cancer testing panel”), to obtain a value of fold up-regulation for each sample relative to median of the normal PM samples.

[1519] FIG. 50 is a histogram showing over expression of the above-indicated Stromelysin-3 precursor (SEQ ID NO:363) (EC 3.4.24.-) (Matrix metalloproteinase-11) (MMP-11) (ST3) (SL-3) transcripts in cancerous breast samples relative to the normal samples. Values represent the average of duplicate experiments. Error bars indicate the minimal and maximal values obtained.

[1520] As is evident from FIG. 50, the expression of Stromelysin-3 precursor (SEQ ID NO:363) (EC 3.4.24.-) (Matrix metalloproteinase-11) (MMP-11) (ST3) (SL-3) transcripts detectable by the above amplicon in cancer samples was significantly higher than in the non-cancerous samples (Sample Nos. 56-60, 63-67 Table 6, above, “Tissue samples inbreast cancer testing panel”). Notably an over-expression of at least 5 fold was found in 20 out of 28 adenocarcinoma samples.

[1521] Statistical analysis was applied to verify the significance of these results, as described below.

[1522] The P value for the difference in the expression levels of Stromelysin-3 precursor (SEQ ID NO:363) (EC 3.4.24.-) (Matrix metalloproteinase-11) (MMP-11) (ST3) (SL-3) transcripts detectable by the above amplicon in Breast cancer samples versus the normal tissue samples was determined by T test as 6.46E-03.

[1523] Threshold of 5 fold overexpression was found to differentiate between cancer and normal samples with P value of 1.12E-03 as checked by exact fisher test. The above values demonstrate statistical significance of the results.

[1524] By dissecting the patient's population into four age groups (indicated below the graph), we demonstrate that the transcripts detected by the above amplicon are highly expressed mainly in patients with age above 55 and/or patients with an age below 45

[1525] Primer pairs are also optionally and preferably encompassed within the present invention; for example, for the above experiment, the following primer pair was used as a non-limiting illustrative example only of a suitable primer pair: HSSTROL3 seg24F (SEQ ID NO:382) forward primer; and HSSTROL3 seg24R (SEQ ID NO:383) reverse primer. The present invention also preferably encompasses any amplicon obtained through the use of any suitable primer pair; for example, for the above experiment, the following amplicon was obtained as a non-limiting illustrative example only of a suitable amplicon: HSSTROL3 seg24 (SEQ ID NO:384).

HSSTROL3 seg24 Forward Primer (SEQ ID NO:382):
ATTTCCATCCTCAACTGGCAGA
HSSTROL3 seg24 Reverse Primer (SEQ ID NO:383):
TGCCCTGGAACCCACG
HSSTROL3 seg24 Amplicon (SEQ ID NO:384):
ATTTCCATCCTCAACTGGCAGAGATGAGAGCCTGGAGCATTGCAGATGCC
AGGGACTTCACAAATGAAGGCACAGCATGGGAAACCTGCGTGGGTTCCAG
GGCA

Expression of Homo sapiens matrix metalloproteinase 11 (stromelysin 3) (MMP11) HSSTROL3 transcripts which are detectable by amplicon as depicted in sequence name HSSTROL3 seg24 (SEQ ID NO:384) in normal and cancerous colon tissues

[1526] Expression of Homo sapiens matrix metalloproteinase 11 (stromelysin 3) (MMP11) transcripts detectable by or according to seg24, HSSTROL3 seg24 (SEQ ID NO:384) amplicon and primers HSSTROL3 seg24F (SEQ ID NO:382) and HSSTROL3 seg24R (SEQ ID NO:383) was measured by real time PCR. In parallel the expression of four housekeeping genes—PBGD (GenBank Accession No. BC019323 (SEQ ID NO:6); amplicon—PBGD-amplicon (SEQ ID NO:32)), HPRT1 (GenBank Accession No. NM_{—}000194 (SEQ ID NO:5); amplicon—HPRT1-amplicon (SEQ ID NO:35)), G6PD (GenBank Accession No. NM_{—}000402 (SEQ ID NO:8); G6PD amplicon (SEQ ID NO: 44),), RPS27A (GenBank Accession No. NM_{—}002954 (SEQ ID NO:1); RPS27A amplicon (SEQ ID NO: 47)), was measured similarly. For each RT sample, the expression of the above amplicon was normalized to the geometric mean of the quantities of the housekeeping genes. The normalized quantity of each RT sample was then divided by the median of the quantities of the normal post-mortem (PM) samples (Sample Nos. 41,52,62-67, 69-71, Table 4, above, “Tissue samples in colon cancer testing panel”), to obtain a value of fold differential expression for each sample relative to median of the normal PM samples.

[1527] In one experiment that was carried out no differential expression in the cancerous samples relative to the normal PM samples was observed.

[1528] Primer pairs are also optionally and preferably encompassed within the present invention; for example, for the above experiment, the following primer pair was used as a non-limiting illustrative example only of a suitable primer pair: HSSTROL3 seg24F (SEQ ID NO:382) forward primer; and HSSTROL3 seg24R (SEQ ID NO:383) reverse primer.

[1529] The present invention also preferably encompasses any amplicon obtained through the use of any suitable primer pair; for example, for the above experiment, the following amplicon was obtained as a non-limiting illustrative example only of a suitable amplicon: HSSTROL3 seg24 (SEQ ID NO:384).

[1530] Primers:

Forward primer HSSTROL3 seg24F (SEQ ID NO:382):
ATTTCCATCCTCAACTGGCAGA
Reverse primer HSSTROL3 seg24R (SEQ ID NO:383):
TGCCCTGGAACCCACG
Amplicon HSSTROL3 seg24 (SEQ ID NO:384):
ATTTCCATCCTCAACTGGCAGAGATGAGAGCCTGGAGCATTGCAGATGCC
AGGGACTTCACAAATGAAGGCACAGCATGGGAAACCTGCGTGGGTTCCAG
GGCA

Expression of Stromelysin-3 precursor (SEQ ID NO:363) HSSTROL3 transcripts which are detectable by amplicon as depicted in sequence name HSSTROL3 seg24 (SEQ ID NO:384) in normal and cancerous lung tissues

[1531] Expression of Stromelysin-3 precursor (SEQ ID NO:363) (EC 3.4.24.-) (Matrix metalloproteinase-11) (MMP-11) (ST3) (SL-3) transcripts detectable by or according to seg24, HSSTROL3 seg24 (SEQ ID NO:384) amplicon and HSSTROL3 seg24F (SEQ ID NO:382) and HSSTROL3 seg24R (SEQ ID NO:383) primers was measured by real time PCR. In parallel the expression of four housekeeping genes—PBGD (GenBank Accession No. BC019323 (SEQ ID NO:6); amplicon—PBGD-amplicon (SEQ ID NO:32), HPRT1 (GenBank Accession No. NM_{—}000194 (SEQ ID NO:5); amplicon—HPRT1-amplicon (SEQ ID NO:35)), Ubiquitin (GenBank Accession No. BC000449 (SEQ ID NO:9); amplicon—Ubiquitin-amplicon (SEQ ID NO:50)) and SDHA (GenBank Accession No. NM_{—}004168 (SEQ ID NO:4); amplicon—SDHA-amplicon (SEQ ID NO:29)) was measured similarly. For each RT sample, the expression of the above amplicon was normalized to the geometric mean of the quantities of the housekeeping genes. The normalized quantity of each RT sample was then divided by the median of the quantities of the normal post-mortem (PM) samples (Sample Nos. 47-50, 90-93, 96-99, Table 5, “Tissue samples in lung cancer testing panel”, above), to obtain a value of fold up-regulation for each sample relative to median of the normal PM samples.

[1532] FIG. 51 is a histogram showing over expression of the above-indicated Stromelysin-3 precursor (SEQ ID NO:363) transcripts in cancerous lung samples relative to the normal samples. Values represent the average of duplicate experiments. Error bars indicate the minimal and maximal values obtained.)

[1533] As is evident from FIG. 51, the expression of Stromelysin-3 precursor (SEQ ID NO:363) transcripts detectable by the above amplicon in cancer samples was significantly higher than in the non-cancerous samples (Sample Nos. 47-50, 90-93, 96-99 Table 5, “Tissue samples in lung cancer testing panel”). Notably an over-expression of at least 5 fold was found in 13 out of 15 adenocarcinoma samples, 8 out of 16 squamous cell carcinoma samples, 3 out of 4 large cell carcinoma samples and in 7 out of 8 small cell carcinoma samples.

[1534] Threshold of 5 fold overexpression was found to differentiate between cancer and normal samples with P value of 4.04E-04 in adenocarcinoma, 9.89E-02 in squamous cell carcinoma, 6.04E-02 in Large cell carcinoma, 3.14E-03 in small cell carcinoma as checked by exact fisher test. The above values demonstrate statistical significance of the results.

[1535] Primer pairs are also optionally and preferably encompassed within the present invention; for example, for the above experiment, the following primer pair was used as a non-limiting illustrative example only of a suitable primer pair: HSSTROL3 seg24F (SEQ ID NO:382) forward primer; and HSSTROL3 seg24R (SEQ ID NO:383) reverse primer.

[1536] The present invention also preferably encompasses any amplicon obtained through the use of any suitable primer pair; for example, for the above experiment, the following amplicon was obtained as a non-limiting illustrative example only of a suitable amplicon: HSSTROL3 seg24 (SEQ ID NO:384).

Forward Primer HSSTROL3 seg24 (SEQ ID NO:382):
ATTTCCATCCTCAACTGGCAGA
Reverse Primer HSSTROL3 seg24 (SEQ ID NO:383):
TGCCCTGGAACCCACG
Amplicon HSSTROL3 seg24 (SEQ ID NO:384):
ATTTCCATCCTCAACTGGCAGAGATGAGAGCCTGGAGCATTGCAGATGCC
AGGGACTTCACAAATGAAGGCACAGCATGGGAAACCTGCGTGGGTTCCAG
GGCA

Expression of Stromelysin-3 precursor (SEQ ID NO:363) (EC 3.4.24.-) (Matrix metalloproteinase-11) (MMP-11) (ST3) (SL-3)HSSTROL3 transcripts which are detectable by amplicon as depicted in sequence name HSSTROL3 seg24 (SEQ ID NO:384) in different normal tissues

[1537] Expression of Stromelysin-3 precursor (SEQ ID NO:363) (EC 3.4.24.-) (Matrix metalloproteinase-11) (MMP-11) (ST3) (SL-3) transcripts detectable by or according to HSSTROL3 seg24 (SEQ ID NO:384) amplicon and HSSTROL3 seg24F (SEQ ID NO:382) and HSSTROL3 seg24R (SEQ ID NO:383) was measured by real time PCR. In parallel the expression of four housekeeping genes UBC (GenBank Accession No. BC000449 (SEQ ID NO:9); amplicon—Ubiquitin-amplicon (SEQ ID NO:50)) and SDHA (GenBank Accession No. NM_{—}004168 (SEQ ID NO:4); amplicon—SDHA-amplicon (SEQ ID NO:29)), RPL19 (GenBank Accession No. NM_{—}000981 (SEQ ID NO:7); RPL19 amplicon (SEQ ID NO: 38)), TATA box (GenBank Accession No. NM_{—}003194 (SEQ ID NO:2); TATA amplicon (SEQ ID NO: 53)) was measured similarly. For each RT sample, the expression of the above amplicon was normalized to the geometric mean of the quantities of the housekeeping genes. The normalized quantity of each RT sample was then divided by the median of the quantities of the breast samples (sample Nos. 33-35 Table 7, “Tissue samples in normal panel” above), to obtain a value of relative expression of each sample relative to median of the breast samples.

[1538] The results are presented in FIG. 52, demonstrating the expression of Stromelysin-3 precursor (SEQ ID NO:363) (EC 3.4.24.-) (Matrix metalloproteinase-11) (MMP-11) (ST3) (SL-3) HSSTROL3 transcripts, which are detectable by amplicon as depicted in sequence name HSSTROL3 seg24 (SEQ ID NO:384), in different normal tissues.

Forward Primer HSSTROL3 seg24 (SEQ ID NO:382):
ATTTCCATCCTCAACTGGCAGA
Reverse Primer HSSTROL3 seg24 (SEQ ID NO:383):
TGCCCTGGAACCCACG
Amplicon HSSTROL3 seg24 (SEQ ID NO:384):
ATTTCCATCCTCAACTGGCAGAGATGAGAGCCTGGAGCATTGCAGATGCC
AGGGACTTCACAAATGAAGGCACAGCATGGGAAACCTGCGTGGGTTCCAG
GGCA

Expression of Stromelysin-3 precursor (SEQ ID NO:363) (EC 3.4.24.-) (Matrix metalloproteinase-11) (MMP-11) (ST3) (SL-3HSSTROL3) transcripts which are detectable by amplicon as depicted in sequence name HSSTROL3 seg24 (SEQ ID NO:384) in normal and cancerous Prostate tissues

[1539] Expression of Stromelysin-3 precursor (SEQ ID NO:363) (EC 3.4.24.-) (Matrix metalloproteinase-11) (MMP-11) (ST3) (SL-3) transcripts detectable by or according to seg24, HSSTROL3 seg24 (SEQ ID NO:384) amplicon(s) and HSSTROL3 seg24F (SEQ ID NO:382) and HSSTROL3 seg24R (SEQ ID NO:383) primers was measured by real time PCR. In parallel the expression of four housekeeping genes—PBGD (GenBank Accession No. BC019323 (SEQ ID NO:6); amplicon—PBGD-amplicon (SEQ ID NO:32)), HPRT1 (GenBank Accession No. NM_{—}000194 (SEQ ID NO:5); amplicon—HPRT1-amplicon (SEQ ID NO:35)), SDHA (GenBank Accession No. NM_{—}004168 (SEQ ID NO:4); amplicon—SDHA-amplicon (SEQ ID NO:29)), and RPL19 (GenBank Accession No. NM_{—}000981 (SEQ ID NO:7); RPL19 amplicon (SEQ ID NO: 38)) was measured similarly. For each RT sample, the expression of the above amplicon was normalized to the geometric mean of the quantities of the housekeeping genes. The normalized quantity of each RT sample was then divided by the median of the quantities of the normal post-mortem (PM) samples (Sample Nos. 42, 48-53, 59-63, Table 2, “Tissue samples in prostate cancer testing panel”, above), to obtain a value of fold up-regulation for each sample relative to median of the normal PM samples.

[1540] FIG. 53 is a histogram showing over expression of the above-indicated Stromelysin-3 precursor (SEQ ID NO:363) transcripts in cancerous Prostate samples relative to the normal samples. Values represent the average of duplicate experiments. Error bars indicate the minimal and maximal values obtained.

[1541] As is evident from FIG. 53, the expression of Stromelysin-3 precursor (SEQ ID NO:363) transcripts detectable by the above amplicon in cancer samples was higher than in several non-cancerous samples (Sample Nos. 42, 48-53, 59-63, Table 2, “Tissue samples in prostate cancer testing panel”). Notably an over-expression of at least 3 fold was found in 4 out of 19 adenocarcinoma samples.

[1542] Statistical analysis was applied to verify the significance of these results, as described below.

[1543] The P value for the difference in the expression levels of Stromelysin-3 precursor (SEQ ID NO:363) transcripts detectable by the above amplicon in Prostate cancer samples versus the normal tissue samples was determined by T test as 2.34E-03.

[1544] The above value demonstrates statistical significance of the results.

[1545] Primer pairs are also optionally and preferably encompassed within the present invention; for example, for the above experiment, the following primer pair was used as a non-limiting illustrative example only of a suitable primer pair: HSSTROL3 seg24F (SEQ ID NO:382) forward primer; and HSSTROL3 seg24R (SEQ ID NO:383) reverse primer.

[1546] The present invention also preferably encompasses any amplicon obtained through the use of any suitable primer pair; for example, for the above experiment, the following amplicon was obtained as a non-limiting illustrative example only of a suitable amplicon: HSSTROL seg24 (SEQ ID NO: 384).

HSSTROL seg24 Forward primer (SEQ ID NO:382):
ATTTCCATCCTCAACTGGCAGA
HSSTROL seg24 Reverse primer (SEQ ID NO:383):
TGCCCTGGAACCCACG
HSSTROL seg24 Amplicon (SEQ ID NO:384):
ATTTCCATCCTCAACTGGCAGAGATGAGAGCCTGGAGCATTGCAGATGCC
AGGGACTTCACAAATGAAGGCACAGCATGGGAAACCTGCGTGGGTTCCAG
GGCA

Expression of Homo sapiens matrix metalloproteinase 11 (stromelysin 3) (MMP11) HSSTROL3 transcripts which are detectable by amplicon as depicted in sequence name HSSTROL3 seg25 (SEQ ID NO:387) in normal and cancerous colon tissues

[1547] Expression of Homo sapiens matrix metalloproteinase 11 (stromelysin 3) (MMP11) transcripts detectable by or according to seg25, HSSTROL3seg 25 (SEQ ID NO: 387) amplicon and primers HSSTROL3 seg25F (SEQ ID NO:385) and HSSTROL3 seg25R (SEQ ID NO:386) was measured by real time PCR. In parallel the expression of four housekeeping genes—PBGD (GenBank Accession No. BC019323 (SEQ ID NO:6); amplicon—PBGD-amplicon (SEQ ID NO:32)), HPRT1 (GenBank Accession No. NM_{—}000194 (SEQ ID NO:5); amplicon—HPRT1-amplicon (SEQ ID NO:35)), G6PD (GenBank Accession No. NM_{—}000402 (SEQ ID NO:8); G6PD-amplicon (SEQ ID NO: 44),), RPS27A (GenBank Accession No. NM_{—}002954 (SEQ ID NO:1); RPS27A amplicon (SEQ ID NO: 47)), was measured similarly. For each RT sample, the expression of the above amplicon was normalized to the geometric mean of the quantities of the housekeeping genes. The normalized quantity of each RT sample was then divided by the median of the quantities of the normal post-mortem (PM) samples (Sample Nos. 41, 52, 62-67, 69-71, Table 4, “Tissue samples in colon cancer testing panel”, above), to obtain a value of fold up-regulation for each sample relative to median of the normal PM samples.

[1548] FIG. 54 is a histogram showing over expression of the above-indicated Homo sapiens matrix metalloproteinase 11 (stromelysin 3) (MMP11) transcripts in cancerous colon samples relative to the normal samples.

[1549] As is evident from FIG. 54, the expression of Homo sapiens matrix metalloproteinase 11 (stromelysin 3) (MMP11) transcripts detectable by the above amplicon was higher in a few cancer samples than in the non-cancerous samples (Sample Nos. 41, 52, 62-67, 69-71 Table 4, “Tissue samples in colon cancer testing panel”). Notably an over-expression of at least 5 fold was found in 5 out of 36 adenocarcinoma samples.

[1550] Primer pairs are also optionally and preferably encompassed within the present invention; for example, for the above experiment, the following primer pair was used as a non-limiting illustrative example only of a suitable primer pair: HSSTROL3 seg25F (SEQ ID NO:385) forward primer; and HSSTROL3 seg25R (SEQ ID NO:386) reverse primer.

[1551] The present invention also preferably encompasses any amplicon obtained through the use of any suitable primer pair; for example, for the above experiment, the following amplicon was obtained as a non-limiting illustrative example only of a suitable amplicon: HSSTROL3 seg25 (SEQ ID NO:387).

[1552] Primers:

Forward primer HSSTROL3 seg25F (SEQ ID NO:385):
CACTGCCCCAGCTTATCCC
Reverse primer HSSTROL3 seg25R (SEQ ID NO:386):
CTCTCCCAGCCTCAGTTTCCT
Amplicon HSSTROL3 seg25 (SEQ ID NO:387):
CACTGCCCCAGCTTATCCCAGGCCTCCCGCTTCCCTCTGCGGGTGGGGTG
CTGAGCAGGCATTATTGGCCTGCATGTTTTACTGATGAGGAAACTGAGGC
TGGGAGAG

Expression of Stromelysin-3 precursor (SEQ ID NO:363) (EC 3.4.24.-) (Matrix metalloproteinase-11) (MMP-11) (ST3) (SL-3) HSSTROL3 transcripts which are detectable by amplicon as depicted in sequence name HSSTROL3 seg25 (SEQ ID NO:387) in normal and cancerous breast tissues

[1553] Expression of Stromelysin-3 precursor (SEQ ID NO:363) transcripts detectable by or according to seg25, HSSTROL3 seg25 (SEQ ID NO:387) amplicon and primers HSSTROL3 seg25F (SEQ ID NO:385) and HSSTROL3 seg25R (SEQ ID NO:386) was measured by real time PCR (RNA was as for the experiment above). In parallel the expression of four housekeeping genes—PBGD (GenBank Accession No. BC019323 (SEQ ID NO:6); amplicon—PBGD-amplicon (SEQ ID NO:32)), HPRT1 (GenBank Accession No. NM_{—}000194 (SEQ ID NO:5); amplicon—HPRT1-amplicon (SEQ ID NO:35)), SDHA (GenBank Accession No. NM_{—}004168 (SEQ ID NO:4); amplicon—SDHA-amplicon (SEQ ID NO:29)), G6PD (GenBank Accession No. NM_{—}000402 (SEQ ID NO:8); G6PD amplicon (SEQ ID NO: 44)) was measured similarly. For each RT sample, the expression of the above amplicon was normalized to the geometric mean of the quantities of the housekeeping genes. The normalized quantity of each RT sample was then divided by the median of the quantities of the normal post-mortem (PM) samples (Sample Nos. 56-60, 63-67, Table 6, “Tissue samples in breast cancer testing panel”, above), to obtain a value of fold up-regulation for each sample relative to median of the normal PM samples.

[1554] FIG. 55 is a histogram showing over expression of the above-indicated Stromelysin-3 precursor (SEQ ID NO:363) transcripts in cancerous breast samples relative to the normal samples.

[1555] As is evident from FIG. 55, the expression of Stromelysin-3 precursor (SEQ ID NO:363) transcripts detectable by the above amplicon in cancer samples was significantly higher than in the non-cancerous samples (Sample Nos. 56-60, 63-67 Table 6, “Tissue samples in breast cancer testing panel”, above). Notably an over-expression of at least 5 fold was found in 20 out of 28 adenocarcinoma samples.

[1556] Statistical analysis was applied to verify the significance of these results, as described below.

[1557] The P value for the difference in the expression levels of Stromelysin-3 precursor (SEQ ID NO:363) transcripts detectable by the above amplicon in breast cancer samples versus the normal tissue samples was determined by T test as 5.79E-02.

[1558] Threshold of 5 fold overexpression was found to differentiate between cancer and normal samples with P value of 6.75E-03 as checked by exact fisher test. The above values demonstrate statistical significance of the results.

[1559] By dissecting the patient's population into four age groups (indicated below the graph), we demonstrate that the transcripts detected by the above amplicon are highly expressed mainly in patient with age above 55 and/or patients with an age below 45.

[1560] Primer pairs are also optionally and preferably encompassed within the present invention; for example, for the above experiment, the following primer pair was used as a non-limiting illustrative example only of a suitable primer pair: HSSTROL seg25F (SEQ ID NO: 385) forward primer; and HSSTROL seg25R (SEQ ID NO: 386) reverse primer.

[1561] The present invention also preferably encompasses any amplicon obtained through the use of any suitable primer pair; for example, for the above experiment, the following amplicon was obtained as a non-limiting illustrative example only of a suitable amplicon: HSSTROL seg25 (SEQ ID NO: 387).

Forward primer HSSTROL seg25F (SEQ ID NO:385):
CACTGCCCCAGCTTATCCC
Reverse primer HSSTROL seg25R (SEQ ID NO:386):
CTCTCCCAGCCTCAGTTTCCT
Amplicon HSSTROL seg25 (SEQ ID NO:387):
CACTGCCCCAGCTTATCCCAGGCCTCCCGCTTCCCTCTGCGGGTGGGGTG
CTGAGCAGGCATTATTGGCCTGCATGTTTTACTGATGAGGAAACTGAGGC
TGGGAGAG

Expression of Homo sapiens matrix metalloproteinase 11 (stromelysin 3) (MMP11) HSSTROL3 transcripts which are detectable by amplicon as depicted in sequence name HSSTROL3 seg25 (SEQ ID NO:387) in normal and cancerous lung tissues

[1562] Expression of Homo sapiens matrix metalloproteinase 11 (stromelysin 3) (MMP11) transcripts detectable by or according to seg25—HSSTROL3 seg25 (SEQ ID NO:387) amplicon and primers HSSTROL3 seg25F (SEQ ID NO:385) and HSSTROL3 seg25R (SEQ ID NO:386) was measured by real time PCR. In parallel the expression of four housekeeping genes—PBGD (GenBank Accession No. BC019323 (SEQ ID NO:6); amplicon—PBGD-amplicon (SEQ ID NO:32)), HPRT1 (GenBank Accession No. NM_{—}000194 (SEQ ID NO:5); amplicon—HPRT1-amplicon (SEQ ID NO:35)), Ubiquitin (GenBank Accession No. BC000449 (SEQ ID NO:9); amplicon—Ubiquitin-amplicon (SEQ ID NO:50)) and SDHA (GenBank Accession No. NM_{—}004168 (SEQ ID NO:4); amplicon—SDHA-amplicon (SEQ ID NO:29)) was measured similarly. For each RT sample, the expression of the above amplicon was normalized to the geometric mean of the quantities of the housekeeping genes. The normalized quantity of each RT sample was then divided by the median of the quantities of the normal post-mortem (PM) samples (Sample Nos. 47-50, 90-93, 96-99, Table 5, above, “Tissue samples in lung cancer testing panel”), to obtain a value of fold up-regulation for each sample relative to median of the normal PM samples.

[1563] FIG. 56 is a histogram showing over expression of the above-indicated Homo sapiens matrix metalloproteinase 11 (stromelysin 3) (MMP11) transcripts in cancerous lung samples relative to the normal samples.

[1564] As is evident from FIG. 56, the expression of Homo sapiens matrix metalloproteinase 11 (stromelysin 3) (MMP11) transcripts detectable by the above amplicon in cancer samples was higher than in the non-cancerous samples (Sample Nos. 46-50, 90-93, 96-99 Table 5, above, “Tissue samples in lung cancer testing panel”). Notably an over-expression of at least 5 fold was found in 13 out of 15 adenocarcinoma samples, 8 out of 16 squamous cell carcinoma samples, 2 out of 4 large cell carcinoma samples and in 7 out of 8 small cells carcinoma samples.

[1565] Primer pairs are also optionally and preferably encompassed within the present invention; for example, for the above experiment, the following primer pair was used as a non-limiting illustrative example only of a suitable primer pair: HSSTROL3 seg25F (SEQ ID NO:385) forward primer; and HSSTROL3 seg25R (SEQ ID NO:386) reverse primer.

[1566] The present invention also preferably encompasses any amplicon obtained through the use of any suitable primer pair; for example, for the above experiment, the following amplicon was obtained as a non-limiting illustrative example only of a suitable amplicon: HSSTROL3.

[1567] Primers:

Forward primer HSSTROL3 seg25F (SEQ ID NO:385):
CACTGCCCCAGCTTATCCC
Reverse primer HSSTROL3 seg25R (SEQ ID NO:386):
CTCTCCCAGCCTCAGTTTCCT
Amplicon HSSTROL3 seg25 (SEQ ID NO:387):
CACTGCCCCAGCTTATCCCAGGCCTCCCGCTTCCCTCTGCGGGTGGGGTG
CTGAGCAGGCATTATTGGCCTGCATGTTTTACTGATGAGGAAACTGAGGC
TGGGAGAG

Expression of Homo sapiens matrix metalloproteinase 11 (stromelysin 3) (MMP11) HSSTROL3 transcripts which are detectable by amplicon as depicted in sequence name HSSTROL3 seg25 (SEQ ID NO:387) in normal and cancerous ovary tissues

[1568] Expression of Homo sapiens matrix metalloproteinase 11 (stromelysin 3) (MMP11) transcripts detectable by or according to seg25, HSSTROL3 seg25 (SEQ ID NO:387) amplicon and primers HSSTROL3 seg25F (SEQ ID NO:385) and HSSTROL3 seg25R (SEQ ID NO:386) was measured by real time PCR. In parallel the expression of four housekeeping genes—PBGD (GenBank Accession No. BC019323 (SEQ ID NO:6); amplicon—PBGD-amplicon (SEQ ID NO:32)), HPRT1 (GenBank Accession No. NM_{—}000194 (SEQ ID NO:5); amplicon—HPRT1-amplicon (SEQ ID NO:35)), SDHA (GenBank Accession No. NM_{—}004168 (SEQ ID NO:4); amplicon—SDHA-amplicon (SEQ ID NO:29)) and GAPDH (GenBank Accession No. BC026907 (SEQ ID NO:3); GAPDH amplicon (SEQ ID NO: 41) was measured similarly. For each RT sample, the expression of the above amplicon was normalized to the geometric mean of the quantities of the housekeeping genes. The normalized quantity of each RT sample was then divided by the median of the quantities of the normal post-mortem (PM) samples (Sample Nos. 45, 46, 48, 71, Table 3, above, “Tissue samples in ovarian cancer testing panel”), to obtain a value of fold differential expression for each sample relative to median of the normal PM samples.

[1569] In one experiment that was carried out no differential expression in the cancerous samples relative to the normal PM samples was observed.

[1570] Primer pairs are also optionally and preferably encompassed within the present invention; for example, for the above experiment, the following primer pair was used as a non-limiting illustrative example only of a suitable primer pair: HSSTROL3 seg25F (SEQ ID NO:385) forward primer; and HSSTROL3 seg25R (SEQ ID NO:386) reverse primer.

[1571] The present invention also preferably encompasses any amplicon obtained through the use of any suitable primer pair; for example, for the above experiment, the following amplicon was obtained as a non-limiting illustrative example only of a suitable amplicon: HSSTROL3 seg25 (SEQ ID NO:387).

[1572] Primers:

Forward primer HSSTROL3 seg25F (SEQ ID NO:385):
CACTGCCCCAGCTTATCCC
Reverse primer HSSTROL3 seg254R (SEQ ID NO:386):
CTCTCCCAGCCTCAGTTTCCT
Amplicon HSSTROL3 seg25 (SEQ ID NO:387):
CACTGCCCCAGCTTATCCCAGGCCTCCCGCTTCCCTCTGCGGGTGGGGTG
CTGAGCAGGCATTATTGGCCTGCATGTTTTACTGATGAGGAAACTGAGGC
TGGGAGAG

Expression of Stromelysin-3 precursor (SEQ ID NO:363) (EC 3.4.24.-) (Matrix metalloproteinase-11) (MMP-11) (ST3) (SL-3HSSTROL3) transcripts which are detectable by amplicon as depicted in sequence name HSSTROL3 seg25 (SEQ ID NO:387) in normal and cancerous Prostate tissues

[1573] Expression of Stromelysin-3 precursor (SEQ ID NO:363) (EC 3.4.24.-) (Matrix metalloproteinase-11) (MMP-11) (ST3) (SL-3) transcripts detectable by or according to seg25, HSSTROL3 seg25 (SEQ ID NO:387) amplicon and HSSTROL3 seg25F (SEQ ID NO:385) and HSSTROL3 seg25R (SEQ ID NO:386) primers was measured by real time PCR. In parallel the expression of four housekeeping genes—PBGD (GenBank Accession No. BC019323 (SEQ ID NO:6); amplicon—PBGD-amplicon (SEQ ID NO:32)), HPRT1 (GenBank Accession No. NM_{—}000194 (SEQ ID NO:5); amplicon—HPRT1-amplicon (SEQ ID NO:35)), SDHA (GenBank Accession No. NM_{—}004168 (SEQ ID NO:4); amplicon—SDHA-amplicon (SEQ ID NO:29)), and RPL19 (GenBank Accession No. NM_{—}000981 (SEQ ID NO:7); RPL19 amplicon (SEQ ID NO: 38)) was measured similarly. For each RT sample, the expression of the above amplicon was normalized to the geometric mean of the quantities of the housekeeping genes. The normalized quantity of each RT sample was then divided by the median of the quantities of the normal post-mortem (PM) samples (Sample Nos. 42, 48-53, 59-63, Table 2, “Tissue samples in prostate cancer testing panel”, above), to obtain a value of fold up-regulation for each sample relative to median of the normal PM samples.

[1574] FIG. 57 is a histogram showing over expression of the above-indicated Stromelysin-3 precursor (SEQ ID NO:363) transcripts in cancerous Prostate samples relative to the normal samples. Values represent the average of duplicate experiments.

[1575] As is evident from FIG. 57, the expression of Stromelysin-3 precursor (SEQ ID NO:363) transcripts detectable by the above amplicon in cancer samples was higher than in several non-cancerous samples (Sample Nos. 42, 48-53, 59-63, Table 2, “Tissue samples in prostate cancer testing panel”). Notably an over-expression of at least 5 fold was found in 7 out of 19 adenocarcinoma samples.

[1576] Primer pairs are also optionally and preferably encompassed within the present invention; for example, for the above experiment, the following primer pair was used as a non-limiting illustrative example only of a suitable primer pair: HSSTROL3 seg25F (SEQ ID NO:385) forward primer; and HSSTROL3 seg25R (SEQ ID NO:386) reverse primer.

[1577] The present invention also preferably encompasses any amplicon obtained through the use of any suitable primer pair; for example, for the above experiment, the following amplicon was obtained as a non-limiting illustrative example only of a suitable amplicon: HSSTROL seg25 (SEQ ID NO: 387).

[1578] Primers:

Forward primer HSSTROL3 seg25F (SEQ ID NO:385):
CACTGCCCCAGCTTATCCC
Reverse primer HSSTROL3 seg25R (SEQ ID NO:386):
CTCTCCCAGCCTCAGTTTCCT
Amplicon HSSTROL3 seg25 (SEQ ID NO:387):
CACTGCCCCAGCTTATCCCAGGCCTCCCGCTTCCCTCTGCGGGTGGGGTG
CTGAGCAGGCATTATTGGCCTGCATGTTTTACTGATGAGGAAACTGAGGC
TGGGAGAG

### Description for Cluster HUMGRP5E

[1579] Cluster HUMGRP5E features 5 transcript(s) and 7 segment(s) of interest, the names for which are given in Tables 143 and 144, respectively. The selected protein variants are given in table 145.

TABLE 143
Transcripts of interest
Transcript Name

HUMGRP5E_T1 (SEQ ID NO: 388)
HUMGRP5E_T2 (SEQ ID NO: 389)
HUMGRP5E_T3 (SEQ ID NO: 390)
HUMGRP5E_T4 (SEQ ID NO: 391)
HUMGRP5E_T5 (SEQ ID NO: 392)

TABLE 144
Segments of interest

| Segment Name | Corresponding Transcript(s) |
|---|---|
| HUMGRP5E_node_0 | HUMGRP5E_T1 (SEQ ID NO: 388), |
| (SEQ ID NO: 393) | HUMGRP5E_T2 (SEQ ID NO: 389), |
| | HUMGRP5E_T4 (SEQ ID NO: 391) and |
| | HUMGRP5E_T5 (SEQ ID NO: 392) |
| HUMGRP5E_node_2 | HUMGRP5E_T1 (SEQ ID NO: 388), |
| (SEQ ID NO: 394) | HUMGRP5E_T2 (SEQ ID NO: 389), |
| | HUMGRP5E_T4 (SEQ ID NO: 391) and |
| | HUMGRP5E_T5 (SEQ ID NO: 392) |
| HUMGRP5E_node_5 | HUMGRP5E_T3 (SEQ ID NO: 390) |
| (SEQ ID NO: 395) | |
| HUMGRP5E_node_8 | HUMGRP5E_T1 (SEQ ID NO: 388), |
| (SEQ ID NO: 396) | HUMGRP5E_T2 (SEQ ID NO: 389), |
| | HUMGRP5E_T3 (SEQ ID NO: 390), |
| | HUMGRP5E_T4 (SEQ ID NO: 391) and |
| | HUMGRP5E_T5 (SEQ ID NO: 392) |
| HUMGRP5E_node_3 | HUMGRP5E_T4 (SEQ ID NO: 391) and |
| (SEQ ID NO: 397) | HUMGRP5E_T5 (SEQ ID NO: 392) |
| HUMGRP5E_node_6 | HUMGRP5E_T1 (SEQ ID NO: 388) and |
| (SEQ ID NO: 398) | HUMGRP5E_T3 (SEQ ID NO: 390) |
| HUMGRP5E_node_7 | HUMGRP5E_T1 (SEQ ID NO: 388), |
| (SEQ ID NO: 399) | HUMGRP5E_T2 (SEQ ID NO: 389), |
| | HUMGRP5E_T3 (SEQ ID NO: 390) and |
| | HUMGRP5E_T5 (SEQ ID NO: 392) |

TABLE 145
Proteins of interest

| Protein Name | Corresponding Transcript(s) |
|---|---|
| HUMGRP5E_P2 | HUMGRP5E_T1 (SEQ ID NO: 388) |
| (SEQ ID NO: 401) | |
| HUMGRP5E_P3 (SEQ ID | HUMGRP5E_T2 (SEQ ID NO: 389) |
| NO: 402) | |
| HUMGRP5E_P4 (SEQ ID | HUMGRP5E_T4 (SEQ ID NO: 391) |
| NO: 403) | |
| HUMGRP5E_P5 (SEQ ID NO: | HUMGRP5E_T5 (SEQ ID NO: 392) |
| 404) | |

[1580] These sequences are variants of the known protein Gastrin-releasing peptide precursor (SEQ ID NO:400) (SwissProt accession identifier GRP_HUMAN (SEQ ID NO:400); known also according to the synonyms GRP; GRP-10), referred to herein as the previously known protein.

[1581] Protein Gastrin-releasing peptide precursor (SEQ ID NO:400) is known or believed to have the following function(s): GRP stimulates gastrin release as well as other gastrointestinal hormones. Known polymorphisms for this sequence are as shown in Table 146.

TABLE 146
Amino acid mutations for Known Protein

| SNP position(s) on amino | |
|---|---|
| acid sequence | Comment |
| 4 | S -> R |

[1582] Protein Gastrin-releasing peptide precursor (SEQ ID NO:400) localization is believed to be Secreted.

[1583] The previously known protein also has the following indication(s) and/or potential therapeutic use(s): Diabetes, Type II. It has been investigated for clinical/therapeutic use in humans, for example as a target for an antibody or small molecule, and/or as a direct therapeutic; available information related to these investigations is as follows. Potential pharmaceutically related or therapeutically related activity or activities of the previously known protein are as follows: Bombesin antagonist; Insulinotropin agonist. A therapeutic role for a protein represented by the cluster has been predicted. The cluster was assigned this field because there was information in the drug database or the public databases (e.g., described herein above) that this protein, or part thereof, is used or can be used for a potential therapeutic indication: Anorectic/Antiobesity; Releasing hormone; Anticancer; Respiratory; Antidiabetic.

[1584] The following GO Annotation(s) apply to the previously known protein. The following annotation(s) were found: signal transduction; neuropeptide signaling pathway, which are annotation(s) related to Biological Process; growth factor, which are annotation(s) related to Molecular Function; and soluble fraction, which are annotation(s) related to Cellular Component.

[1585] The GO assignment relies on information from one or more of the SwissProt/TremBl Protein knowledgebase, available from <http://www.expasy.ch/sprot/>; or Locuslink, available from <http://www.ncbi.nlm.nih.gov/projects/LocusLink/>.

[1586] According to optional but preferred embodiments of the present invention, variants of this cluster according to the present invention (amino acid and/or nucleic acid sequences of HUMGRP5E) may optionally have one or more of the following utilities, as described with regard to Table 147 below. It should be noted that these utilities are optionally and preferably suitable for human and non-human animals as subjects, except where otherwise noted. The reasoning is described with regard to biological and/or physiological and/or other information about the known protein, but is given to demonstrate particular diagnostic utility for the variants according to the present invention.

TABLE 147
Utilities for Variants of HUMGRP5E

| Utility | Reason | Reference |
|---|---|---|
| Detection of esophageal | Significant over-expression of GRP | Carcinogenesis. 2004 |
| squamous cell carcinomas by | was observed in 10 out of 12 ESCC | Jun; 25(6): 865-71. |
| mRNA or protein assay. | samples (83.3%) and all four ESCC | J Natl Cancer Inst. 2002 |
| | cell lines. | Mar 6; 94(5): 375-83. |
| | | Oncogene. 2003 Sep |
| | | 18; 22(40): 6183-93. |
| Detection and diagnosis of | The serum Pro-GRP levels were | Anticancer Res. 2003 Mar-Apr; |
| Small Cell lung cancer and | elevated in SCLC patients. | 23(2A): 895-8. |
| carcinoid lung tumors by | In the 9 patients with SCLC who | Anticancer Res. 1999 Jul-Aug; |
| mRNA or protein essay for GRP | relapsed, the serum Pro-GRP levels | 19(4A): 2673-8. |
| or proGRP; also a marker for | were again elevated at the time of | Oncology. 1999; 57(2): 143-8. |
| treatment monitoring and | relapse. | Lung Cancer. 2000 |
| survival in small-cell lung | | Mar; 27(3): 159-67. |
| cancer. | | Jpn J Cancer Res. 1995 |
| | | Jul; 86(7): 698-705. |
| | | Cancer Res. 1994 Apr |
| | | 15; 54(8): 2136-40. |
| | | Clin Lab. 2003; 49(1-2): 35-42. |
| | | Proc. Nat. Acad. Sci. 81: |
| | | 5699-5703, 1984. |
| Detection of medullary thyroid | Serum Pro-GRP levels were elevated | Thyroid. 2001 |
| carcinoma by use of mRNA or | in 80% (12/15) patients. | Nov; 11(11): 1055-61. |
| protein assay for GRP or pro- | | Oncology. 2000 |
| GRP | | Aug; 59(2): 122-5. |
| | | Metabolism. 1984 |
| | | Aug; 33(8): 724-7. |
| Detection and diagnosis of | All of the patients with normal renal | Nihon Kokyuki Gakkai |
| chronic renal failure by use of | function, whether they had diabetes | Zasshi. 2002 |
| protein assay for GRP or pro- | mellitus (n = 16), rheumatoid arthritis | May; 40(5): 369-72 |
| GRP | (n = 10), systemic lupus erythematosus | Nephrol Dial Transplant. |
| | (n = 12) or chronic glomerulonephritis | 1996 Jul; 11(7): 1267-70. |
| | (n = 14), had serum pro-gastrin- | Respirology. 1998 |
| | releasing peptide concentrations less | Sep; 3(3): 207-10. |
| | than 46 ng/l, the upper limit in normal | |
| | subjects. In contrast, 14 or 16 patients | |
| | (88%) with small-cell lung carcinoma, | |
| | who had normal renal function, and 25 | |
| | of 26 (96%) patients with chronic renal | |
| | failure on haemodialysis had serum | |
| | pro-gastrin-releasing peptide | |
| | concentrations greater than 46 ng/l. | |
| Detection, diagnosis and | GRP was expressed in 18 radical | World J Urol. 2003 |
| progression prediction | prostatectomy specimens (60%) and in | Aug; 21(3): 183-7. Epub |
| (prognosis) in prostate cancer by | 15 biopsies (50%). There was an | 2003 Jul 5. |
| use of protein assay for GRP or | association between positive | Int J Cancer. 1998 Feb |
| pro-GRP. | immunoexpression of GRP, relapse | 20; 79(1): 82-90. |
| | (P = 0.029) and advanced tumor stages | Cancer. 2004 Aug |
| | (i.e. pT3, pT4) (P = 0.049). | 1; 101(3): 527-32. |
| Detection of melanoma, | Existence of GRP in all | Melanoma Res. 2000 |
| particularly nodular melanomas, | clinicopathological types of melanoma; | Aug; 10(4): 395-400. |
| by use of protein assay for GRP | a predilection for quantitatively | J Dermatol Sci. 1998 |
| or pro-GRP. | increased GRP immunostaining was | Jun; 17(2): 93-100. |
| | noticed in nodular melanomas (P = | |
| | 0.007). | |
| Detection of early stages of | BN/GRP-like peptide is present in the | Clin Exp Rheumatol. 2001 |
| rheumatoid arthritis by use of | synovial fluid of joints affected by | Nov-Dec; 19(6): 715-20. |
| protein levels in serum and | arthritis and that the pattern of | |
| synovial fluid. | BN/GRP increase differs from that of | |
| | SP. It appears as if the presence of | |
| | BN/GRP is particularly related to the | |
| | early processes of joint involvement. | |
| Detection of retroperitoneal | All the conditioned media from the | Am J Surg. 1995 |
| pediatric malignant tumors | benign tumors contained <25 pg/mL | May; 169(5): 550-2. |
| (such as ganglioneuromas, | net GRP, whereas all the malignant | Ann Surg. 2002 |
| neuroblastoma, primitive | tumor-conditioned media contained > | May; 235(5): 621-9; |
| neuroectodermal tumor, Ewing | or = 45 pg/mL (P = 0.003). | discussion 629-30. |
| tumor family, ect.). | | Curr Surg. 2001 |
| | | Jan; 58(1): 86-89. |
| | | Cancer Res. 1998 Jun |
| | | 1; 58(11): 2469-76. |
| Monitoring Helicobacter pylori | GRP levels are higher in HP positive | 1. Gastroenterology. 1995 |
| eradication in duodenal ulcers | patients, and its levels are reduced after | Sep; 109(3): 681-91. |
| patients. | treatment and HP eradication. | 1. Aliment Pharmacol |
| | | Ther. 1995 Aug; 9(4): 341-7. |
| | | Review |
| | | 2. Gut. 1996 |
| | | May; 38(5): 663-7. |
| Breast cancer | Bombesin or gastrin-releasing peptide | Eur J Cancer. 1998 |
| | (GRP) may act as autocrine growth | Apr; 34(5): 710-7 |
| | factors and play a role in the initiation | |
| | and progression of breast cancer | |

[1587] According to other optional embodiments of the present invention, variants of this cluster according to the present invention (amino acid and/or nucleic acid sequences of HUMGRP5E) may optionally have one or more of the following utilities, some of which are related to utilities described above. It should be noted that these utilities are optionally and preferably suitable for human and non-human animals as subjects, except where otherwise noted.

[1588] A non-limiting example of such a utility is detecting and/or diagnosing cancer, and/or the immune response of a subject to cancer, by using at least one HUMGRP5E variant according to the present invention. Such use of the known protein is described with regard to US Patent Application No. 2003/0232399, hereby incorporated by reference as if fully set forth herein.

[1589] Another non-limiting example of such a utility is diagnosing and/or monitoring testicular cancer in a subject, by using at least one HUMGRP5E variant according to the present invention. Such use of the known protein is described with regard to PCT Application No. WO 03/044224, hereby incorporated by reference as if fully set forth herein.

[1590] Yet another non-limiting example of such a utility is diagnosing and/or monitoring lung cancer in a subject, optionally and preferably small cell lung cancer, by using at least one HUMGRP5E variant according to the present invention. Such use of the known protein is described with regard to U.S. Pat. No. 5,770,385, hereby incorporated by reference as if fully set forth herein.

Table 148 below describes diagnostic utilities for the cluster HUMGRP5E that were found through microarrays, including the statistical significance thereof and a reference. One or more HUMGRP5E variants according to the present invention may optionally have one or more of these utilities.

TABLE 148

| | Statistical | |
|---|---|---|
| Diagnostic utility | significance | reference |
| Gene over expression in small cell lung | Ranging | Bhattacharjee A, Meyerson M PNAS |
| cancer (vs. normal and other types of | between 0.002 | (2001) Classification of human lung |
| lung cancer). | to 5e⁻⁴ | carcinomas by mRNA expression profiling |
| | | reveals distinct adenocarcinoma |
| | | subclasses. |
| | | Garber ME, Petersen I PNAS (2001) |
| | | Diversity of gene expression in |
| | | adenocarcinoma of the lung |
| Gene over expression in carcinoid lung | 4e⁻⁴ | Bhattacharjee A, Meyerson M PNAS |
| cancer (vs. normal and other types of | | (2001) Classification of human lung |
| lung cancer). | | carcinomas by mRNA expression profiling |
| | | reveals distinct adenocarcinoma |
| | | subclasses. |
| Breast cancer prognosis, gene over | 0.036, 9.3e⁻¹¹, | Sorlie T, Borresen-Dale AL PNAS (2001) |
| expressed in patients with better survival | 0.001 | Gene expression patterns of breast |
| prediction (ER positive, negative lymph | respectively | carcinomas distinguish tumor subclasses |
| infiltrate and are in grade 1) | | with clinical implications. |
| | | Van't Veer LJ, Friend SH Nature (2002) |
| | | Gene expression profiling predicts clinical |
| | | outcome of breast cancer. |
| | | Perou CM, Botstein D Nature (2000) |
| | | Molecular portraits of human breast |
| | | tumours. |
| Gene over expressed in severe | | GNF database |
| emphysema (vs. normal lung or mild | | (http://www.ncbi.nlm.nih.gov/projects/geo/): |
| emphysema). | | GDS737, probe ID: 206326_at. |

[1591] Also, microarrays have shown that one or more HUMGRP5E variants according to the present invention may optionally be either overexpressed in lung cancer, preferably carcinoid non small cell lung cancer, or alternatively may be underexpressed in lung cancer, preferably adenocarcinoma.

[1592] Other non-limiting exemplary utilities for HUMGRP5E variants according to the present invention are described in greater detail below and also with regard to the previous section on clinical utility.

[1593] For this cluster, at least one oligonucleotide was found to demonstrate overexpression of the cluster, although not of at least one transcript/segment as listed below. Microarray (chip) data is also available for this cluster as follows. Various oligonucleotides were tested for being differentially expressed in various disease conditions, particularly cancer, as previously described. The following oligonucleotides were found to hit this cluster but not other segments/transcripts below, shown in Table 149.

TABLE 149
Oligonucleotides related to this cluster

| | | Chip |
|---|---|---|
| Oligonucleotide name | Overexpressed in cancers | reference |
| HUMGRP5E_0_0_16630 (SEQ | lung malignant tumors | LUN |
| ID NO: 10) | | |

[1594] As noted above, cluster HUMGRP5E features 5 transcript(s), which were listed in Table 143 above. These transcript(s) encode for protein(s) which are variant(s) of protein Gastrin-releasing peptide precursor (SEQ ID NO:400). A description of each variant protein according to the present invention is now provided.

[1595] Variant protein HUMGRP5E_P2 (SEQ ID NO:401) according to the present invention has an amino acid sequence; it is encoded by transcript(s) HUMGRP5E_T1 (SEQ ID NO:388). An alignment is given to the known protein (Gastrin-releasing peptide precursor (SEQ ID NO:400)) at the end of the application. One or more alignments to one or more previously published protein sequences are given in the alignment table located on the attached CDROM. A brief description of the relationship of the variant protein according to the present invention to each such aligned protein is as follows:

[1596] Comparison report between HUMGRP5E_P2 (SEQ ID NO:401) and GRP_HUMAN (SEQ ID NO:400):

[1597] 1. An isolated chimeric polypeptide encoding for HUMGRP5E_P2 (SEQ ID NO:401), comprising a first amino acid sequence being at least 90% homologous to MRGSELPLVLLALVLCLAPRGRAVPLPAGGGTVLTKMYPRGNHWAVGHLMGKKSTGESSSVSER GSLKQQLREYIRWEEAARNLLGLIEAKENRNHQPPQPKALGNQQPSWDSEDSSNFKD corresponding to amino acids 1-121 of GRP_HUMAN (SEQ ID NO:400), which also corresponds to amino acids 1-121 of HUMGRP5E_P2 (SEQ ID NO:401), and a second amino acid sequence being at least 70%, optionally at least 80%, preferably at least 85%, more preferably at least 90% and most preferably at least 95% homologous to a polypeptide having the sequence LVDSLLQVLNVKEGTPS (SEQ ID NO: 657) corresponding to amino acids 122-138 of HUMGRP5E_P2 (SEQ ID NO:401), wherein said first amino acid sequence and second amino acid sequence are contiguous and in a sequential order.

[1598] 2. An isolated polypeptide encoding for a tail of HUMGRP5E_P2 (SEQ ID NO:401), comprising a polypeptide being at least 70%, optionally at least about 80%, preferably at least about 85%, more preferably at least about 90% and most preferably at least about 95% homologous to the sequence LVDSLLQVLNVKEGTPS (SEQ ID NO: 657) in HUMGRP5E_P2 (SEQ ID NO:401).

[1599] The location of the variant protein was determined according to results from a number of different software programs and analyses, including analyses from SignalP and other specialized programs. The variant protein is believed to be located as follows with regard to the cell: secreted.

[1600] The phosphorylation sites of variant protein HUMGRP5E_P2 (SEQ ID NO:401), as compared to the known protein Gastrin-releasing peptide precursor (SEQ ID NO:400), are described in Table 150 (given according to their position(s) on the amino acid sequence in the first column; the second column indicates whether the phosphorylation site is present in the variant protein; and the last column indicates whether the position is different on the variant protein).

TABLE 150
Phosphorylation site(s)

| Position(s) on known | | Position in |
|---|---|---|
| amino acid sequence | Present in variant protein? | variant protein? |
| 50 | yes | 50 |

[1601] The variant protein has the following domains, as determined by using InterPro. The domains are described in Table 151:

TABLE 151
InterPro domain(s)

| | | | Position(s) |
|---|---|---|---|
| InterPro ID | Domain description | Analysis type | on protein |
| IPR000874 | Bombesin-like peptide | HMMPfam | 41-54 |
| IPR000874 | Bombesin-like peptide | ScanRegExp | 44-50 |

[1602] Variant protein HUMGRP5E_P2 (SEQ ID NO:401) is encoded by the following transcript(s): HUMGRP5E_T1 (SEQ ID NO:388). The coding portion of transcript HUMGRP5E_T1 (SEQ ID NO:388) starts at position 622 and ends at position 1035. The transcript also has the following SNPs as listed in Table 152 (given according to their position on the nucleotide sequence, with the alternative nucleic acid listed; the last column indicates whether the SNP is known or not; the presence of known SNPs in variant protein HUMGRP5E_P2 (SEQ ID NO:401) sequence provides support for the deduced sequence of this variant protein according to the present invention).

TABLE 152
Nucleic acid SNPs

| SNP position on | | |
|---|---|---|
| nucleotide sequence | Alternative nucleic acid | Previously known SNP? |
| 541 | -> T | No |
| 542 | G -> T | No |
| 631 | A -> C | Yes |
| 672 | G -> A | Yes |
| 1342 | C -> | No |
| 1342 | C -> A | No |
| 1343 | A -> | No |
| 1343 | A -> G | No |

[1603] Variant protein HUMGRP5E_P3 (SEQ ID NO:402) according to the present invention has an amino acid sequence; it is encoded by transcript(s) HUMGRP5E_T2 (SEQ ID NO:389). An alignment is given to the known protein (Gastrin-releasing peptide precursor (SEQ ID NO:400)). One or more alignments to one or more previously published protein sequences are given at the in the alignment table located on the attached CDROM. A brief description of the relationship of the variant protein according to the present invention to each such aligned protein is as follows:

[1604] Comparison report between HUMGRP5E_P3 (SEQ ID NO:402) and GRP_HUMAN (SEQ ID NO:400):

[1605] 1. An isolated chimeric polypeptide encoding for HUMGRP5E_P3 (SEQ ID NO:402), comprising a first amino acid sequence being at least 90% homologous to MRGSELPLVLLALVLCLAPRGRAVPLPAGGGTVLTKMYPRGNHWAVGHLMGKKSTGESSSVSER GSLKQQLREYIRWEEAARNLLGLIEAKENRNHQPPQPKALGNQQPSWDSEDSSNFKD corresponding to amino acids 1-121 of GRP_HUMAN (SEQ ID NO:400), which also corresponds to amino acids 1-121 of HUMGRP5E_P3 (SEQ ID NO:402), and a second amino acid sequence being at least 70%, optionally at least 80%, preferably at least 85%, more preferably at least 90% and most preferably at least 95% homologous to a polypeptide having the sequence TLCSRFST (SEQ ID NO: 658) corresponding to amino acids 122-129 of HUMGRP5E_P3 (SEQ ID NO:402), wherein said first amino acid sequence and second amino acid sequence are contiguous and in a sequential order.

[1606] 2. An isolated polypeptide encoding for a tail of HUMGRP5E_P3 (SEQ ID NO:402), comprising a polypeptide being at least 70%, optionally at least about 80%, preferably at least about 85%, more preferably at least about 90% and most preferably at least about 95% homologous to the sequence TLCSRFST (SEQ ID NO: 658) in HUMGRP5E_P3 (SEQ ID NO:402).

[1607] The location of the variant protein was determined according to results from a number of different software programs and analyses, including analyses from SignalP and other specialized programs. The variant protein is believed to be located as follows with regard to the cell: secreted.

[1608] The phosphorylation sites of variant protein HUMGRP5E_P3 (SEQ ID NO:402), as compared to the known protein Gastrin-releasing peptide precursor (SEQ ID NO:400), are described in Table 153 (given according to their position(s) on the amino acid sequence in the first column; the second column indicates whether the phosphorylation site is present in the variant protein; and the last column indicates whether the position is different on the variant protein).

TABLE 153
Phosphorylation site(s)

| Position(s) on known | | Position |
|---|---|---|
| amino acid sequence | Present in variant protein? | in variant protein? |
| 50 | yes | 50 |

[1609] The variant protein has the following domains, as determined by using InterPro. The domains are described in Table 154:

TABLE 154
InterPro domain(s)

| | | | Position(s) on |
|---|---|---|---|
| InterPro ID | Domain description | Analysis type | protein |
| IPR000874 | Bombesin-like peptide | HMMPfam | 41-54 |
| IPR000874 | Bombesin-like peptide | ScanRegExp | 44-50 |

[1610] Variant protein HUMGRP5E_P3 (SEQ ID NO:402) is encoded by the following transcript(s): HUMGRP5E_T2 (SEQ ID NO:389). The coding portion of transcript HUMGRP5E_T2 (SEQ ID NO:389) starts at position 622 and ends at position 1008. The transcript also has the following SNPs as listed in Table 155 (given according to their position on the nucleotide sequence, with the alternative nucleic acid listed; the last column indicates whether the SNP is known or not; the presence of known SNPs in variant protein HUMGRP5E_P3 (SEQ ID NO:402) sequence provides support for the deduced sequence of this variant protein according to the present invention).

TABLE 155
Nucleic acid SNPs

| SNP position on | | |
|---|---|---|
| nucleotide sequence | Alternative nucleic acid | Previously known SNP? |
| 541 | -> T | No |
| 542 | G -> T | No |
| 631 | A -> C | Yes |
| 672 | G -> A | Yes |
| 1335 | C -> | No |
| 1335 | C -> A | No |
| 1336 | A -> | No |
| 1336 | A -> G | No |

[1611] Variant protein HUMGRP5E_P4 (SEQ ID NO:403) according to the present invention has an amino acid sequence; it is encoded by transcript(s) HUMGRP5E_T4 (SEQ ID NO:391). An alignment is given to the known protein (Gastrin-releasing peptide precursor (SEQ ID NO:400)) at the end of the application. One or more alignments to one or more previously published protein sequences are given in the alignment table located on the attached CDROM. A brief description of the relationship of the variant protein according to the present invention to each such aligned protein is as follows:

[1612] Comparison report between HUMGRP5E_P4 (SEQ ID NO:403) and GRP_HUMAN (SEQ ID NO:400):

[1613] 1. An isolated chimeric polypeptide encoding for HUMGRP5E_P4 (SEQ ID NO:403), comprising a first amino acid sequence being at least 90% homologous to MRGSELPLVLLALVLCLAPRGRAVPLPAGGGTVLTKMYPRGNHWAVGHLMGKKSTGESSSVSER GSLKQQLREYIRWEEAARNLLGLIEAKENRNHQPPQPKALGNQQPSWDSEDSSNFKDVGSKGK corresponding to amino acids 1-127 of GRP_HUMAN (SEQ ID NO:400), which also corresponds to amino acids 1-127 of HUMGRP5E_P4 (SEQ ID NO:403), and a second amino acid sequence being at least 90% homologous to GSQREGRNPQLNQQ corresponding to amino acids 135-148 of GRP_HUMAN (SEQ ID NO:400), which also corresponds to amino acids 128-141 of HUMGRP5E_P4 (SEQ ID NO:403), wherein said first amino acid sequence and second amino acid sequence are contiguous and in a sequential order.

[1614] 2. An isolated chimeric polypeptide encoding for an edge portion of HUMGRP5E_P4 (SEQ ID NO:403), comprising a polypeptide having a length “n”, wherein n is at least about 10 amino acids in length, optionally at least about 20 amino acids in length, preferably at least about 30 amino acids in length, more preferably at least about 40 amino acids in length and most preferably at least about 50 amino acids in length, wherein at least two amino acids comprise KG, having a structure as follows: a sequence starting from any of amino acid numbers 127−x to 127; and ending at any of amino acid numbers 128+((n−2)−x), in which x varies from 0 to n−2.

[1615] The location of the variant protein was determined according to results from a number of different software programs and analyses, including analyses from SignalP and other specialized programs. The variant protein is believed to be located as follows with regard to the cell: secreted.

[1616] The phosphorylation sites of variant protein HUMGRP5E_P4 (SEQ ID NO:403), as compared to the known protein Gastrin-releasing peptide precursor (SEQ ID NO:400), are described in Table 156 (given according to their position(s) on the amino acid sequence in the first column; the second column indicates whether the phosphorylation site is present in the variant protein; and the last column indicates whether the position is different on the variant protein).

TABLE 156
Phosphorylation site(s)

| Position(s) on known amino | | Position in |
|---|---|---|
| acid sequence | Present in variant protein? | variant protein? |
| 50 | yes | 50 |

[1617] The variant protein has the following domains, as determined by using InterPro. The domains are described in Table 157:

TABLE 157
InterPro domain(s)

| | | | Position(s) on |
|---|---|---|---|
| InterPro ID | Domain description | Analysis type | protein |
| IPR000874 | Bombesin-like peptide | HMMPfam | 41-54 |
| IPR000874 | Bombesin-like peptide | ScanRegExp | 44-50 |

[1618] Variant protein HUMGRP5E_P4 (SEQ ID NO:403) is encoded by the following transcript(s): HUMGRP5E_T4 (SEQ ID NO:391). The coding portion of transcript HUMGRP5E_T4 (SEQ ID NO:391) starts at position 622 and ends at position 1044. The transcript also has the following SNPs as listed in Table 158 (given according to their position on the nucleotide sequence, with the alternative nucleic acid listed; the last column indicates whether the SNP is known or not; the presence of known SNPs in variant protein HUMGRP5E_P4 (SEQ ID NO:403) sequence provides support for the deduced sequence of this variant protein according to the present invention).

TABLE 158
Nucleic acid SNPs

| SNP position on | | |
|---|---|---|
| nucleotide sequence | Alternative nucleic acid | Previously known SNP? |
| 541 | -> T | No |
| 542 | G -> T | No |
| 631 | A -> C | Yes |
| 672 | G -> A | Yes |
| 1340 | C -> | No |
| 1340 | C -> A | No |
| 1341 | A -> | No |
| 1341 | A -> G | No |

[1619] Variant protein HUMGRP5E_P5 (SEQ ID NO:404) according to the present invention has an amino acid sequence; it is encoded by transcript(s) HUMGRP5E_T5 (SEQ ID NO:392). An alignment is given to the known protein (Gastrin-releasing peptide precursor (SEQ ID NO:400)). One or more alignments to one or more previously published protein sequences are given in the alignment table located on the attached CDROM. A brief description of the relationship of the variant protein according to the present invention to each such aligned protein is as follows:

[1620] Comparison report between HUMGRP5E_P5 (SEQ ID NO:404) and GRP_HUMAN (SEQ ID NO:400):

[1621] 1. An isolated chimeric polypeptide encoding for HUMGRP5E_P5 (SEQ ID NO:404), comprising a first amino acid sequence being at least 90% homologous to MRGSELPLVLLALVLCLAPRGRAVPLPAGGGTVLTKMYPRGNHWAVGHLMGKKSTGESSSVSER GSLKQQLREYIRWEEAARNLLGLIEAKENRNHQPPQPKALGNQQPSWDSEDSSNFKDVGSKGK corresponding to amino acids 1-127 of GRP_HUMAN (SEQ ID NO:400), which also corresponds to amino acids 1-127 of HUMGRP5E_P5 (SEQ ID NO:404), and a second amino acid sequence being at least 70%, optionally at least 80%, preferably at least 85%, more preferably at least 90% and most preferably at least 95% homologous to a polypeptide having the sequence DSLLQVLNVKEGTPS (SEQ ID NO: 659) corresponding to amino acids 128-142 of HUMGRP5E_P5 (SEQ ID NO:404), wherein said first amino acid sequence and second amino acid sequence are contiguous and in a sequential order.

[1622] 2. An isolated polypeptide encoding for a tail of HUMGRP5E_P5 (SEQ ID NO:404), comprising a polypeptide being at least 70%, optionally at least about 80%, preferably at least about 85%, more preferably at least about 90% and most preferably at least about 95% homologous to the sequence DSLLQVLNVKEGTPS (SEQ ID NO: 659) in HUMGRP5E_P5 (SEQ ID NO:404).

[1623] The location of the variant protein was determined according to results from a number of different software programs and analyses, including analyses from SignalP and other specialized programs. The variant protein is believed to be located as follows with regard to the cell: secreted.

[1624] The phosphorylation sites of variant protein HUMGRP5E_P5 (SEQ ID NO:404), as compared to the known protein Gastrin-releasing peptide precursor (SEQ ID NO:400), are described in Table 159 (given according to their position(s) on the amino acid sequence in the first column; the second column indicates whether the phosphorylation site is present in the variant protein; and the last column indicates whether the position is different on the variant protein).

TABLE 159
Phosphorylation site(s)

| Position(s) on known amino acid | Present in variant | Position in |
|---|---|---|
| sequence | protein? | variant protein? |
| 50 | yes | 50 |

[1625] The variant protein has the following domains, as determined by using InterPro. The domains are described in Table 160:

TABLE 160
InterPro domain(s)

| | | | Position(s) |
|---|---|---|---|
| InterPro ID | Domain description | Analysis type | on protein |
| IPR000874 | Bombesin-like peptide | HMMPfam | 41-54 |
| IPR000874 | Bombesin-like peptide | ScanRegExp | 44-50 |

[1626] Variant protein HUMGRP5E_P5 (SEQ ID NO:404) is encoded by the following transcript(s): HUMGRP5E_T5 (SEQ ID NO:392). The coding portion of transcript HUMGRP5E_T5 (SEQ ID NO:392) starts at position 622 and ends at position 1047. The transcript also has the following SNPs as listed in Table 161 (given according to their position on the nucleotide sequence, with the alternative nucleic acid listed; the last column indicates whether the SNP is known or not; the presence of known SNPs in variant protein HUMGRP5E_P5 (SEQ ID NO:404) sequence provides support for the deduced sequence of this variant protein according to the present invention).

TABLE 161
Nucleic acid SNPs

| SNP position on nucleotide | | Previously |
|---|---|---|
| sequence | Alternative nucleic acid | known SNP? |
| 541 | -> T | No |
| 542 | G -> T | No |
| 631 | A -> C | Yes |
| 672 | G -> A | Yes |
| 1354 | C -> | No |
| 1354 | C -> A | No |
| 1355 | A -> | No |
| 1355 | A -> G | No |

[1627] Table 162 below describes the starting and ending position of HUMGRP5E_node_{—}2 (SEQ ID NO:394) on each of the relevant transcripts. Experimental results for this segment are described below.

TABLE 162
Segment location on transcripts

| | Segment | Segment |
|---|---|---|
| Transcript name | starting position | ending position |
| HUMGRP5E_T1 (SEQ ID NO: 388) | 761 | 984 |
| HUMGRP5E_T2 (SEQ ID NO: 389) | 761 | 984 |
| HUMGRP5E_T4 (SEQ ID NO: 391) | 761 | 984 |
| HUMGRP5E_T5 (SEQ ID NO: 392) | 761 | 984 |

[1628] Microarray (chip) data is also available for this segment as follows. As described above with regard to the cluster itself, various oligonucleotides were tested for being differentially expressed in various disease conditions, particularly cancer. The following oligonucleotides were found to hit this segment, shown in Table 163.

TABLE 163
Oligonucleotides related to this segment

| | Overexpressed | |
|---|---|---|
| Oligonucleotide name | in cancers | Chip reference |
| HUMGRP5E_0_2_0 (SEQ ID | lung malignant tumors | LUN |
| NO: 11) | | |

Expression of Homo sapiens gastrin-releasing peptide (GRP) HUMGRP5E transcripts which are detectable by amplicon as depicted in sequence name HUMGRP5E seg2 (SEQ ID NO:407) in normal and cancerous lung tissues

[1629] Expression of Homo sapiens gastrin-releasing peptide (GRP) transcripts detectable by or according to seg2—HUMGRP5E seg2 (SEQ ID NO:407) amplicon and primers HUMGRP5E seg2F (SEQ ID NO:405) and HUMGRP5E seg2R (SEQ ID NO:406) was measured by real time PCR. In parallel the expression of four housekeeping genes—PBGD (GenBank Accession No. BC019323 (SEQ ID NO:6); amplicon—PBGD-amplicon (SEQ ID NO:32)), HPRT1 (GenBank Accession No. NM_{—}000194 (SEQ ID NO:5); amplicon—HPRT1-amplicon (SEQ ID NO:35)), Ubiquitin (GenBank Accession No. BC000449 (SEQ ID NO:9); amplicon—Ubiquitin-amplicon (SEQ ID NO:50)) and SDHA (GenBank Accession No. NM_{—}004168 (SEQ ID NO:4); amplicon—SDHA-amplicon (SEQ ID NO:29)) was measured similarly. For each RT sample, the expression of the above amplicon was normalized to the geometric mean of the quantities of the housekeeping genes. The normalized quantity of each RT sample was then divided by the median of the quantities of the normal post-mortem (PM) samples (Sample Nos. 47-50, 90-93, 96-99, Table 5, “Tissue samples in lung cancer testing panel”), to obtain a value of fold up-regulation for each sample relative to median of the normal PM samples.

[1630] FIG. 58 is a histogram showing over expression of the above-indicated Homo sapiens gastrin-releasing peptide (GRP) transcripts in cancerous lung samples relative to the normal samples.

[1631] As is evident from FIG. 58, the expression of Homo sapiens gastrin-releasing peptide (GRP) transcripts detectable by the above amplicon in cancer samples was significantly higher than in the non-cancerous samples (Sample Nos. 46-50, 90-93, 96-99 Table 5, “Tissue samples in lung cancer testing panel”). Notably an over-expression of at least 10 fold was found in 7 out of 8 small cells carcinoma samples.

[1632] Statistical analysis was applied to verify the significance of these results, as described below.

[1633] The P value for the difference in the expression levels of Homo sapiens gastrin-releasing peptide (GRP) transcripts detectable by the above amplicon in lung small cells carcinoma samples versus the normal tissue samples was determined by T test as 425E-03.

[1634] Threshold of 10 fold overexpression was found to differentiate between lung small cells carcinoma and normal samples with P value of 1.03E-04 as checked by exact fisher test. The above values demonstrate statistical significance of the results.

[1635] Primer pairs are also optionally and preferably encompassed within the present invention; for example, for the above experiment, the following primer pair was used as a non-limiting illustrative example only of a suitable primer pair: HUMGRP5E seg2F (SEQ ID NO:405) forward primer; and HUMGRP5E seg2R (SEQ ID NO:406) reverse primer.

[1636] The present invention also preferably encompasses any amplicon obtained through the use of any suitable primer pair; for example, for the above experiment, the following amplicon was obtained as a non-limiting illustrative example only of a suitable amplicon: HUMGRP5E seg2 (SEQ ID NO:407).

[1637] Primers:

Forward primer HUMGRP5E seg2F (SEQ ID NO:405):
GTGGGAAGAAGCTGCAAGGA
Reverse primer HUMGRP5E seg2R (SEQ ID NO:406):
CCACGAAGGCTGCTGATTG
Amplicon HUMGRP5E seg2 (SEQ ID NO:407):
GTGGGAAGAAGCTGCAAGGAATTTGCTGGGTCTCATAGAAGCAAAGGAGA
ACAGAAACCACCAGCCACCTCAACCCAAGGCCCTGGGCAATCAGCAGCCT
TCGTGG

Expression of Homo sapiens gastrin-releasing peptide (GRP) HUMGRP5E transcripts which are detectable by amplicon as depicted in sequence name HUMGRP5E seg2 (SEQ ID NO: 407) in different normal tissues

[1638] Expression of Homo sapiens gastrin-releasing peptide (GRP) transcripts detectable by or according to HUMGRP5E seg2 (SEQ ID NO: 407) amplicon and primers: HUMGRP5E seg2F (SEQ ID NO: 405) and HUMGRP5E seg2Rseg2F (SEQ ID NO: 406) was measured by real time PCR. In parallel the expression of four housekeeping genes—RPL19 (GenBank Accession No. NM_{—}000981 (SEQ ID NO:7); RPL19 amplicon (SEQ ID NO: 38)), TATA box (GenBank Accession No. NM_{—}003194 (SEQ ID NO:2); TATA amplicon (SEQ ID NO: 53)), Ubiquitin (GenBank Accession No. BC000449 (SEQ ID NO:9); amplicon—Ubiquitin-amplicon (SEQ ID NO:50)) and SDHA (GenBank Accession No. NM_{—}004168 (SEQ ID NO:4); amplicon—SDHA-amplicon (SEQ ID NO:29)) was measured similarly. For each RT sample, the expression of the above amplicon was normalized to the geometric mean of the quantities of the housekeeping genes. The normalized quantity of each RT sample was then divided by the median of the quantities of the breast samples (Sample Nos. 33-35 Table 7, “Tissue samples in normal panel”), to obtain a value of relative expression of each sample relative to median of the breast samples.

[1639] FIG. 59 is a histogram showing Expression of Homo sapiens gastrin-releasing peptide (GRP) HUMGRP5E transcripts which are detectable by amplicon as depicted in sequence name HUMGRP5E seg2 (SEQ ID NO: 407) in different normal tissues

[1640] Primers:

Forward primer HUMGRP5E seg2F (SEQ ID NO:405):
GTGGGAAGAAGCTGCAAGGA
Reverse primer HUMGRP5E seg2R (SEQ ID NO:406):
CCACGAAGGCTGCTGATTG
Amplicon HUMGRP5E seg2 (SEQ ID NO:407):
GTGGGAAGAAGCTGCAAGGAATTTGCTGGGTCTCATAGAAGCAAAGGAGA
ACAGAAACCACCAGCCACCTCAACCCAAGGCCCTGGGCAATCAGCAGCCT
TCGTGG

Expression of Homo sapiens gastrin-releasing peptide (GRP) HUMGRP5E transcripts which are detectable by amplicon as depicted in sequence name HUMGRP5E seg2 (SEQ ID NO:407) in normal and cancerous breast tissues

[1641] Expression of Homo sapiens gastrin-releasing peptide (GRP) transcripts detectable by or according to seg2—HUMGRP5E seg2 (SEQ ID NO:407) amplicon and primers HUMGRP5E seg2F (SEQ ID NO:405) and HUMGRP5E seg2R (SEQ ID NO:406) was measured by real time PCR. In parallel the expression of four housekeeping genes—PBGD (GenBank Accession No. BC019323 (SEQ ID NO:6); amplicon—PBGD-amplicon (SEQ ID NO:32)), HPRT1 (GenBank Accession No. NM_{—}000194 (SEQ ID NO:5); amplicon—HPRT1-amplicon (SEQ ID NO:35)), SDHA (GenBank Accession No. NM_{—}004168 (SEQ ID NO:4); amplicon—SDHA-amplicon (SEQ ID NO:29)) and G6PD (GenBank Accession No. NM_{—}000402 (SEQ ID NO:8); G6PD amplicon (SEQ ID NO: 44)) was measured similarly. For each RT sample, the expression of the above amplicon was normalized to the geometric mean of the quantities of the housekeeping genes. The normalized quantity of each RT sample was then divided by the median of the quantities of the normal post-mortem (PM) samples (Sample Nos. 56-60, 63-67, Table 6, above, “Tissue samples in breast cancer testing sample”), to obtain a value of fold up-regulation for each sample relative to median of the normal PM samples.

[1642] FIG. 60 is a histogram showing over expression of the above-indicated Homo sapiens gastrin-releasing peptide (GRP) transcripts in cancerous breast samples relative to the normal samples.

[1643] As is evident from FIG. 60, the expression of Homo sapiens gastrin-releasing peptide (GRP) transcripts detectable by the above amplicon in cancer samples was significantly higher than in the non-cancerous samples (Sample Nos. 56-60, 63-67 Table 6, “Tissue samples in breast cancer testing sample”). Notably an over-expression of at least 5 fold was found in 16 out of 28 adenocarcinoma samples.

[1644] Statistical analysis was applied to verify the significance of these results, as described below. The P value for the difference in the expression levels of Homo sapiens gastrin-releasing peptide (GRP) transcripts detectable by the above amplicon in breast cancer samples versus the normal tissue samples was determined by T test as 1.02E-03.

[1645] Threshold of 5 fold overexpression was found to differentiate between cancer and normal samples with P value of 1.37E-03 as checked by exact fisher test. The above values demonstrate statistical significance of the results.

[1646] By dissecting the patient's population into two age groups (indicated below the graph), we demonstrate that the transcripts detected by the above amplicon are highly expressed mainly in patients with an age above 55.

[1647] Primer pairs are also optionally and preferably encompassed within the present invention; for example, for the above experiment, the following primer pair was used as a non-limiting illustrative example only of a suitable primer pair: HUMGRP5E seg2F (SEQ ID NO:405) forward primer; and HUMGRP5E seg2R (SEQ ID NO:406) reverse primer.

[1648] The present invention also preferably encompasses any amplicon obtained through the use of any suitable primer pair; for example, for the above experiment, the following amplicon was obtained as a non-limiting illustrative example only of a suitable amplicon: HUMGRP5E seg2 (SEQ ID NO:407).

[1649] Primers:

Forward primer HUMGRP5E seg2F (SEQ ID NO:405):
GTGGGAAGAAGCTGCAAGGA
Reverse primer HUMGRP5E seg2R (SEQ ID NO:406):
CCACGAAGGCTGCTGATTG
Amplicon HUMGRP5E seg2 (SEQ ID NO:407):
GTGGGAAGAAGCTGCAAGGAATTTGCTGGGTCTCATAGAAGCAAAGGAGA
ACAGAAACCACCAGCCACCTCAACCCAAGGCCCTGGGCAATCAGCAGCCT
TCGTGG

Expression of Homo sapiens gastrin-releasing peptide (GRP) HUMGRP5E transcripts which are detectable by amplicon as depicted in sequence name HUMGRP5E seg2 (SEQ ID NO:407) in normal and cancerous ovary tissues

[1650] Expression of Homo sapiens gastrin-releasing peptide (GRP) transcripts detectable by or according to seg2—HUMGRP5E seg2 (SEQ ID NO:407) amplicon and primers HUMGRP5E seg2F (SEQ ID NO:405) and HUMGRP5E seg2R (SEQ ID NO:406) was measured by real time PCR. In parallel the expression of four housekeeping genes—PBGD (GenBank Accession No. BC019323 (SEQ ID NO:6); amplicon—PBGD-amplicon (SEQ ID NO:32)), HPRT1 (GenBank Accession No. NM_{—}000194 (SEQ ID NO:5); amplicon—HPRT1-amplicon (SEQ ID NO:35)), SDHA (GenBank Accession No. NM_{—}004168 (SEQ ID NO:4); amplicon—SDHA-amplicon (SEQ ID NO:29)) and GAPDH (GenBank Accession No. BC026907 (SEQ ID NO:3); GAPDH amplicon (SEQ ID NO: 41) was measured similarly. For each RT sample, the expression of the above amplicon was normalized to the geometric mean of the quantities of the housekeeping genes. The normalized quantity of each RT sample was then divided by the median of the quantities of the normal post-mortem (PM) samples (Sample Nos. 45, 46, 48, 71, Table 3, above, “Tissue samples in ovarian cancer testing panel”), to obtain a value of fold up-regulation for each sample relative to median of the normal PM samples.

[1651] FIG. 61 is a histogram showing over expression of the above-indicated Homo sapiens gastrin-releasing peptide (GRP) transcripts in cancerous ovary samples relative to the normal samples median. As is evident from FIG. 61, the expression of GRP_HUMAN (SEQ ID NO:400)—gastrin-releasing peptide transcripts detectable by the above amplicon was higher in a few cancer samples than in most of the non-cancerous samples (Sample Nos. 45, 48, 71 Table 3, above, “Tissue samples in ovarian cancer testing panel”).

[1652] Notably an over-expression of at least 5 fold was found in 5 out of 43 adenocarcinoma samples.

[1653] Primer pairs are also optionally and preferably encompassed within the present invention; for example, for the above experiment, the following primer pair was used as a non-limiting illustrative example only of a suitable primer pair: HUMGRP5E seg2F (SEQ ID NO:405) forward primer; and HUMGRP5E seg2R (SEQ ID NO:406) reverse primer.

[1654] The present invention also preferably encompasses any amplicon obtained through the use of any suitable primer pair; for example, for the above experiment, the following amplicon was obtained as a non-limiting illustrative example only of a suitable amplicon: HUMGRP5E seg2 (SEQ ID NO:407).

[1655] Primers:

Forward primer HUMGRP5E seg2F (SEQ ID NO:405):
GTGGGAAGAAGCTGCAAGGA
Reverse primer HUMGRP5E seg2R (SEQ ID NO:406):
CCACGAAGGCTGCTGATTG
Amplicon HUMGRP5E seg2 (SEQ ID NO:407):
GTGGGAAGAAGCTGCAAGGAATTTGCTGGGTCTCATAGAAGCAAAGGAGA
ACAGAAACCACCAGCCACCTCAACCCAAGGCCCTGTGGCAATCAGCAGCC
TTCGTGG

Expression of GRP_HUMAN (SEQ ID NO:400)—gastrin-releasing peptide (HUMGRP5E) transcripts, which are detectable by amplicon, as depicted in sequence name HUMGRP5Ejunc3-7 (SEQ ID NO: 410) in normal and cancerous breast tissues.

[1656] Expression of GRP_HUMAN (SEQ ID NO:400)—gastrin-releasing peptide transcripts detectable by or according to junc3-7, HUMGRP5Ejunc3-7 (SEQ ID NO: 410) amplicon and HUMGRP5Ejunc3-7F (SEQ ID NO: 408) and HUMGRP5Ejunc3-7R (SEQ ID NO: 409) primers was measured by real time PCR. In parallel the expression of four housekeeping genes PBGD (GenBank Accession No. BC019323 (SEQ ID NO:6); amplicon—PBGD-amplicon (SEQ ID NO:32)), HPRT1 (GenBank Accession No. NM_{—}000194 (SEQ ID NO:5); amplicon—HPRT1-amplicon (SEQ ID NO:35)), and SDHA (GenBank Accession No. NM_{—}004168 (SEQ ID NO:4); amplicon—SDHA-amplicon (SEQ ID NO:29)), G6PD (GenBank Accession No. NM_{—}000402 (SEQ ID NO:8); G6PD amplicon (SEQ ID NO: 44)), was measured similarly. For each RT sample, the expression of the above amplicon was normalized to the geometric mean of the quantities of the housekeeping genes. The normalized quantity of each RT sample was then divided by the median of the quantities of the normal post-mortem (PM) samples (Sample Nos. 56-60, 63-67 Table 6, “Tissue samples in breast cancer testing panel”), to obtain a value of fold up-regulation for each sample relative to median of the normal PM samples.

[1657] FIG. 5 is a histogram showing over expression of the above-indicated GRP_HUMAN (SEQ ID NO:400)—gastrin-releasing peptide transcripts in cancerous breast samples relative to the normal samples. Values represent the average of duplicate experiments. Error bars indicate the minimal and maximal values obtained. The number and percentage of samples that exhibit at least 62 fold over-expression, out of the total number of samples tested is indicated in the bottom.

As is evident from FIG. 62, the expression of GRP_HUMAN (SEQ ID NO:400)—gastrin-releasing peptide transcripts detectable by the above amplicon in cancer samples was significantly higher than in the non-cancerous samples (Sample Nos., 56-60, 63-67 table 6, “Tissue samples in breast cancer testing panel”). Notably an over-expression of at least 5 fold was found in 12 out of 28 adenocarcinoma samples. Statistical analysis was applied to verify the significance of these results, as described below.
The P value for the difference in the expression levels of GRP_HUMAN (SEQ ID NO:400)—gastrin-releasing peptide transcripts detectable by the above amplicon in breast cancer samples versus the normal tissue samples was determined by T test as 7.22E-04. Threshold of 5 fold over expression was found to differentiate between cancer and normal samples with P value of 1.12E-02 as checked by exact fisher test. The above values demonstrate statistical significance of the results.
By dissecting the cancer patient's population into two age groups (indicated below the graph), we demonstrate that the transcripts detected by the above amplicon are highly expressed mainly in patients with an age above 55.
Primer pairs are also optionally and preferably encompassed within the present invention; for example, for the above experiment, the following primer pair was used as a non-limiting illustrative example only of a suitable primer pair: HUMGRP5Ejunc3-7F (SEQ ID NO: 408) forward primer; and HUMGRP5Ejunc3-7R (SEQ ID NO: 409) reverse primer.
The present invention also preferably encompasses any amplicon obtained through the use of any suitable primer pair; for example, for the above experiment, the following amplicon was obtained as a non-limiting illustrative example only of a suitable amplicon: HUMGRP5Ejunc3-7 (SEQ ID NO: 410).

HUMGRP5Ejunc3-7F (SEQ ID NO:408):
ACCAGCCACCTCAACCCA
HUMGRP5Ejunc3-7R (SEQ ID NO:409):
CTGGAGCAGAGAGTCTTTGCCT
HUMGRP5Ejunc3-7 (SEQ ID NO:410):
ACCAGCCACCTCAACCCAAGGCCCTGGGCAATCAGCAGCCTTCGTGGGAT
TCAGAGGATAGCAGCAACTTCAAAGATGTAGGTTCAAAAGGCAAAGACTC
TCTGCTCCAG

Expression of GRP_HUMAN (SEQ ID NO:400)—gastrin-releasing peptide HUMGRP5E transcripts, which are detectable by amplicon as depicted in sequence name HUMGRP5E junc3-7 (SEQ ID NO: 410) in normal and cancerous ovary tissues.
Expression of GRP_HUMAN (SEQ ID NO:400)—gastrin-releasing peptide transcripts detectable by or according to HUMGRP5Ejunc3-7 (SEQ ID NO: 410) amplicon and HUMGRP5Ejunc3-7F (SEQ ID NO: 408) and HUMGRP5Ejunc3-7R (SEQ ID NO: 409) primers was measured by real time PCR. In parallel the expression of four housekeeping genes PBGD (GenBank Accession No. BC019323 (SEQ ID NO:6); amplicon—PBGD-amplicon (SEQ ID NO:32)), HPRT1 (GenBank Accession No. NM_{—}000194 (SEQ ID NO:5); amplicon—HPRT1-amplicon and SDHA (GenBank Accession No. NM_{—}004168 (SEQ ID NO:4); amplicon—SDHA-amplicon (SEQ ID NO:29)), GAPDH (GenBank Accession No. BC026907 (SEQ ID NO:3); GAPDH amplicon (SEQ ID NO: 41)) was measured similarly. For each RT sample, the expression of the above amplicon was normalized to the geometric mean of the quantities of the housekeeping genes. The normalized quantity of each RT sample was then divided by the median of the quantities of the normal post-mortem (PM) samples (Sample Nos. 45, 46, 48, 71, Table 3, “Tissue samples in ovarian cancer testing panel”), to obtain a value of fold up-regulation for each sample relative to median of the normal PM samples.
FIG. 63 is a histogram showing over expression of the above-indicated GRP_HUMAN (SEQ ID NO:400)—gastrin-releasing peptide transcripts in cancerous ovary samples relative to the normal samples. Values represent the average of duplicate experiments. Error bars indicate the minimal and maximal values obtained.
As is evident from FIG. 63 the expression of GRP_HUMAN (SEQ ID NO:400)—gastrin-releasing peptide transcripts detectable by the above amplicon was higher in a few cancer samples than in most of the non-cancerous samples (Sample Nos. 45, 48, 71, Table 3, “Tissue samples in ovarian cancer testing panel”). Notably an over-expression of at least 5-fold was found in 4 out of 43 adenocarcinoma samples,

[1658] Primer pairs are also optionally and preferably encompassed within the present invention; for example, for the above experiment, the following primer pair was used as a non-limiting illustrative example only of a suitable primer pair: HUMGRP5Ejunc3-7F (SEQ ID NO: 408) forward primer; and HUMGRP5Ejunc3-7R (SEQ ID NO: 409) reverse primer.

[1659] The present invention also preferably encompasses any amplicon obtained through the use of any suitable primer pair; for example, for the above experiment, the following amplicon was obtained as a non-limiting illustrative example only of a suitable amplicon: HUMGRP5Ejunc3-7 (SEQ ID NO: 410).

HUMGRP5Ejunc3-7F (SEQ ID NO:408)
ACCAGCCACCTCAACCCA
HUMGRP5Ejunc3-7R (SEQ ID NO:409)
CTGGAGCAGAGAGTCTTTGCCT
HUMGRP5Ejunc3-7 (SEQ ID NO:410)
ACCAGCCACCTCAACCCAAGGCCCTGGGCAATCAGCAGCCTTCGTGGGAT
TCAGAGGATAGCAGCAACTTCAAAGATGTAGGTTCAAAAGGCAAAGACTC
TCTGCTCCAG

Expression of GRP_HUMAN (SEQ ID NO:400)—gastrin-releasing peptide HUMGRP5E transcripts, which are detectable by amplicon as depicted in sequence name HUMGRP5E junc3-7 (SEQ ID NO: 410) in normal and cancerous colon tissues.

[1660] Expression of GRP_HUMAN (SEQ ID NO:400)—gastrin-releasing peptide transcripts detectable by or according to HUMGRP5Ejunc3-7 (SEQ ID NO: 410) amplicon and HUMGRP5Ejunc3-7F (SEQ ID NO: 408) and HUMGRP5Ejunc3-7R (SEQ ID NO: 409) primers was measured by real time PCR. In parallel the expression of four housekeeping genes PBGD (GenBank Accession No. BC019323 (SEQ ID NO:6); amplicon—PBGD-amplicon (SEQ ID NO:32)), HPRT1 (GenBank Accession No. NM_{—}000194 (SEQ ID NO:5); amplicon—HPRT1-amplicon (SEQ ID NO:35)), and, G6PD (GenBank Accession No. NM_{—}000402 (SEQ ID NO:8); G6PD amplicon (SEQ ID NO: 44)), RPS27A (GenBank Accession No. NM_{—}002954 (SEQ ID NO:1); RPS27A amplicon (SEQ ID NO: 47)), was measured similarly. For each RT sample, the expression of the above amplicon was normalized to the geometric mean of the quantities of the housekeeping genes. The normalized quantity of each RT sample was then divided by the median of the quantities of the normal post-mortem (PM) samples (Sample Nos. 41, 52, 62-67, 69-71, Table 4, “Tissue samples in colon cancer testing panel”), to obtain a value of fold differential expression for each sample relative to median of the normal PM samples.

[1661] In one experiment that was carried out no differential expression in the cancerous samples relative to the normal PM samples was observed.

[1662] Primer pairs are also optionally and preferably encompassed within the present invention; for example, for the above experiment, the following primer pair was used as a non-limiting illustrative example only of a suitable primer pair: HUMGRP5Ejunc3-7F (SEQ ID NO: 408) forward primer; and HUMGRP5Ejunc3-7R (SEQ ID NO: 409) reverse primer.

[1663] The present invention also preferably encompasses any amplicon obtained through the use of any suitable primer pair; for example, for the above experiment, the following amplicon was obtained as a non-limiting illustrative example only of a suitable amplicon: HUMGRP5Ejunc3-7 (SEQ ID NO: 410).

HUMGRP5Ejunc3-7F (SEQ ID NO:408)
ACCAGCCACCTCAACCCA
HUMGRP5Ejunc3-7R (SEQ ID NO:409)
CTGGAGCAGAGAGTCTTTGCCT
HUMGRP5Ejunc3-7 (SEQ ID NO:410)
ACCAGCCACCTCAACCCAAGGCCCTGGGCAATCAGCAGCCTTCGTGGGAT
TCAGAGGATAGCAGCAACTTCAAAGATGTAGGTTCAAAAGGCAAAGACTC
TCTGCTCCAG

Expression of GRP_HUMAN (SEQ ID NO:400)—gastrin-releasing peptide HUMGRP5E transcripts, which are detectable by amplicon as depicted in sequence name HUMGRP5Ejunc3-7 (SEQ ID NO: 410) in normal and cancerous lung tissues

[1664] Expression of GRP_HUMAN (SEQ ID NO:400)—gastrin-releasing peptide transcripts detectable by or according to HUMGRP5Ejunc3-7 (SEQ ID NO: 410) amplicon and HUMGRP5Ejunc3-7F (SEQ ID NO: 408) and HUMGRP5Ejunc3-7R (SEQ ID NO: 409) primers was measured by real time PCR. In parallel the expression of four housekeeping genes PBGD (GenBank Accession No. BC019323 (SEQ ID NO:6); amplicon—PBGD-amplicon (SEQ ID NO:32)), HPRT1 (GenBank Accession No. NM_{—}000194 (SEQ ID NO:5); amplicon—HPRT1-amplicon (SEQ ID NO:35)), UBC (GenBank Accession No. BC000449 (SEQ ID NO:9); amplicon—Ubiquitin-amplicon (SEQ ID NO:50)) and SDHA (GenBank Accession No. NM_{—}004168 (SEQ ID NO:4); amplicon—SDHA-amplicon (SEQ ID NO:29)), was measured similarly. For each RT sample, the expression of the above amplicon was normalized to the geometric mean of the quantities of the housekeeping genes. The normalized quantity of each RT sample was then divided by the median of the quantities of the normal post-mortem (PM) samples (Sample Nos. 47-50, 90-93, 96-99, Table 5, “Tissue samples in lung cancer testing panel”), to obtain a value of fold up-regulation for each sample relative to median of the normal PM samples.

FIG. 64 is a histogram showing over expression of the above-indicated GRP_HUMAN (SEQ ID NO:400)—gastrin-releasing peptide transcripts in cancerous lung samples relative to the normal samples. The number of samples that exhibit at least 10-fold over-expression, out of the total number of samples tested is indicated in the bottom.
As is evident from FIG. 64, the expression of GRP_HUMAN (SEQ ID NO:400)—gastrin-releasing peptide transcripts detectable by the above amplicon in cancer samples was significantly higher than in the non-cancerous samples (Sample Nos. 47-50, 90-93, 96-99, Table 5, “Tissue samples in lung cancer testing panel”). Notably an over-expression of at least 10 fold was found in 2 out of 15 adenocarcinoma samples, and in 7 out of 8 small cells carcinoma samples.

[1665] Statistical analysis was applied to verify the significance of these results, as described below.

[1666] The P value for the difference in the expression levels of GRP_HUMAN (SEQ ID NO:400)—gastrin-releasing peptide transcripts detectable by the above amplicon in lung cancer samples versus the normal tissue samples was determined by T test as 3.23E-01 in adenocarcinoma cancer and 5.24E-03 in small cell carcinoma.

Threshold of 10 fold over expression was found to differentiate between cancer and normal samples with value of 2.99E-01 in adenocarcinoma cancer and Threshold of 50 fold over expression was found to differentiate between cancer and normal samples with P value of 1.03E-04 in small cell carcinoma as checked by exact fisher test. The above values demonstrate statistical significance of the results. Primer pairs are also optionally and preferably encompassed within the present invention; for example, for the above experiment, the following primer pair was used as a non-limiting illustrative example only of a suitable primer pair: HUMGRP5Ejunc3-7F (SEQ ID NO: 408) forward primer; and HUMGRP5Ejunc3-7R (SEQ ID NO: 409) reverse primer.

[1667] The present invention also preferably encompasses any amplicon obtained through the use of any suitable primer pair; for example, for the above experiment, the following amplicon was obtained as a non-limiting illustrative example only of a suitable amplicon: HUMGRP5Ejunc3-7 (SEQ ID NO: 410).

HUMGRP5Ejunc3-7F (SEQ ID NO:408)
ACCAGCCACCTCAACCCA
HUMGRP5Ejunc3-7R (SEQ ID NO:409)
CTGGAGCAGAGAGTCTTTGCCT
HUMGRP5Ejunc3-7 (SEQ ID NO:410)
ACCAGCCACCTCAACCCAAGGCCCTGGGCAATCAGCAGCCTTCGTGGGAT
TCAGAGGATAGCAGCAACTTCAAAGATGTAGGTTCAAAAGGCAAAGACTC
TCTGCTCCAG

Expression of GRP_HUMAN (SEQ ID NO:400)—gastrin-releasing peptide HUMGRP5E transcripts, which are detectable by amplicon as depicted in sequence name HUMGRP5E junc3-7 (SEQ ID NO: 410) in different normal tissues.

[1668] Expression of GRP_HUMAN (SEQ ID NO:400)—gastrin-releasing peptide transcripts detectable by or according to HUMGRP5E junc3-7 (SEQ ID NO: 410) amplicon and HUMGRP5E junc3-7F (SEQ ID NO:408) and HUMGRP5E junc3-7R (SEQ ID NO:409) was measured by real time PCR. In parallel the expression of four housekeeping genes—RPL19 (GenBank Accession No. NM_{—}000981 (SEQ ID NO:7); RPL19 amplicon (SEQ ID NO: 38)), TATA box (GenBank Accession No. NM_{—}003194 (SEQ ID NO:2); TATA amplicon (SEQ ID NO: 53)), UBC (GenBank Accession No. BC000449 (SEQ ID NO:9); amplicon—Ubiquitin-amplicon (SEQ ID NO:50)) and SDHA (GenBank Accession No. NM_{—}004168 (SEQ ID NO:4); amplicon—SDHA-amplicon (SEQ ID NO:29)) was measured similarly. For each RT sample, the expression of the above amplicon was normalized to the geometric mean of the quantities of the housekeeping genes. The normalized quantity of each RT sample was then divided by the median of the quantities of the breast samples (Sample Nos. 33-35 Table 7, “Tissue samples in normal panel”), to obtain a value of relative expression of each sample relative to median of the breast samples.

[1669] FIG. 65 is a histogram showing expression of GRP_HUMAN (SEQ ID NO:400)—gastrin-releasing peptide HUMGRP5E transcripts, which are detectable by amplicon as depicted in sequence name HUMGRP5E junc3-7 (SEQ ID NO: 410) in different normal tissues.

Forward primer HUMGRP5Ejunc3-7F (SEQ ID NO:408):
ACCAGCCACCTCAACCCA
Reverse primer HUMGRP5Ejunc3-7R (SEQ ID NO:409):
CTGGAGCAGAGAGTCTTTGCCT
Amplicon HUMGRP5Ejunc3-7 (SEQ ID NO:410):
ACCAGCCACCTCAACCCAAGGCCCTGGGCAATCAGCAGCCTTCGTGGGAT
TCAGAGGATAGCAGCAACTTCAAAGATGTAGGTTCAAAAGGCAAAGACTC
TCTGCTCCAG

### Description for Cluster T94936

[1670] Cluster T94936 features 3 transcript(s) and 12 segment(s) of interest, the names for which are given in Tables 164 and 165. The selected protein variants are given in table 166.

TABLE 164
Transcripts of interest
Transcript Name

T94936_PEA_1_PEA_1_T1 (SEQ ID NO: 411)
T94936_PEA_1_PEA_1_T2 (SEQ ID NO: 412)
T94936_PEA_1_PEA_1_T5 (SEQ ID NO: 413)

TABLE 165
Segments of interest

| Segment Name | |
|---|---|
| T94936_PEA_1_PEA_1_node_2 (SEQ ID NO: 414) | T94936_PEA_1_PEA_1_T1 (SEQ ID |
| | NO: 411), T94936_PEA_1_PEA_1_T2 |
| | (SEQ ID NO: 412) and |
| | T94936_PEA_1_PEA_1_T5 (SEQ ID |
| | NO: 413) |
| T94936_PEA_1_PEA_1_node_14 (SEQ ID NO: 415) | T94936_PEA_1_PEA_1_T2 (SEQ ID |
| | NO: 412) |
| T94936_PEA_1_PEA_1_node_16 (SEQ ID NO: 416) | T94936_PEA_1_PEA_1_T2 (SEQ ID |
| | NO: 412) |
| T94936_PEA_1_PEA_1_node_20 (SEQ ID NO: 417) | T94936_PEA_1_PEA_1_T2 (SEQ ID |
| | NO: 412) and T94936_PEA_1_PEA_1_T5 |
| | (SEQ ID NO: 413) |
| T94936_PEA_1_PEA_1_node_23 (SEQ ID NO: 418) | T94936_PEA_1_PEA_1_T1 (SEQ ID |
| | NO: 411) |
| T94936_PEA_1_PEA_1_node_0 (SEQ ID NO: 419) | T94936_PEA_1_PEA_1_T1 (SEQ ID |
| | NO: 411), T94936_PEA_1_PEA_1_T2 |
| | (SEQ ID NO: 412) and |
| | T94936_PEA_1_PEA_1_T5 (SEQ ID |
| | NO: 413) |
| T94936_PEA_1_PEA_1_node_6 (SEQ ID NO: 420) | T94936_PEA_1_PEA_1_T1 (SEQ ID |
| | NO: 411), T94936_PEA_1_PEA_1_T2 |
| | (SEQ ID NO: 412) and |
| | T94936_PEA_1_PEA_1_T5 (SEQ ID |
| | NO: 413) |
| T94936_PEA_1_PEA_1_node_8 (SEQ ID NO: 421) | T94936_PEA_1_PEA_1_T1 (SEQ ID |
| | NO: 411) and T94936_PEA_1_PEA_1_T2 |
| | (SEQ ID NO: 412) |
| T94936_PEA_1_PEA_1_node_9 (SEQ ID NO: 422) | T94936_PEA_1_PEA_1_T1 (SEQ ID |
| | NO: 411), T94936_PEA_1_PEA_1_T2 |
| | (SEQ ID NO: 412) and |
| | T94936_PEA_1_PEA_1_T5 (SEQ ID |
| | NO: 413) |
| T94936_PEA_1_PEA_1_node_11 (SEQ ID NO: 423) | T94936_PEA_1_PEA_1_T1 (SEQ ID |
| | NO: 411), T94936_PEA_1_PEA_1_T2 |
| | (SEQ ID NO: 412) and |
| | T94936_PEA_1_PEA_1_T5 (SEQ ID |
| | NO: 413) |
| T94936_PEA_1_PEA_1_node_13 (SEQ ID NO: 424) | T94936_PEA_1_PEA_1_T1 (SEQ ID |
| | NO: 411), T94936_PEA_1_PEA_1_T2 |
| | (SEQ ID NO: 412) and |
| | T94936_PEA_1_PEA_1_T5 (SEQ ID |
| | NO: 413) |
| T94936_PEA_1_PEA_1_node_17 (SEQ ID NO: 425) | T94936_PEA_1_PEA_1_T1 (SEQ ID |
| | NO: 411), T94936_PEA_1_PEA_1_T2 |
| | (SEQ ID NO: 412) and |
| | T94936_PEA_1_PEA_1_T5 (SEQ ID |
| | NO: 413) |

TABLE 166
Proteins of interest

| Protein Name | Corresponding Transcript(s) |
|---|---|
| T94936_PEA_1_PEA_1_P2 | T94936_PEA_1_PEA_1_T1 |
| (SEQ ID NO: 427) | (SEQ ID NO: 411) |
| T94936_PEA_1_PEA_1_P3 | T94936_PEA_1_PEA_1_T2 |
| (SEQ ID NO: 428) | (SEQ ID NO: 412) |
| T94936_PEA_1_PEA_1_P7 | T94936_PEA_1_PEA_1_T5 |
| (SEQ ID NO: 429) | (SEQ ID NO: 413) |

[1671] These sequences are variants of the known protein Anterior gradient protein 3 (SwissProt accession identifier Q8TD06_HUMAN (SEQ ID NO:695); known also according to the synonyms MLHS642, Breast cancer membrane protein 11, BCMP11, HAG3, hAG3), referred to herein as the previously known protein.

[1672] According to optional but preferred embodiments of the present invention, variants of this cluster according to the present invention (amino acid and/or nucleic acid sequences of T94936) may optionally have one or more of the following utilities, as described with regard to Table 167 below. It should be noted that these utilities are optionally and preferably suitable for human and non-human animals as subjects, except where otherwise noted. The reasoning is described with regard to biological and/or physiological and/or other information about the known protein, but is given to demonstrate particular diagnostic utility for the variants according to the present invention.

TABLE 167
Utilities for Variants of T94936

| | | |
|---|---|---|
| 1. Targets for breast | Shows cancer cell membrane association as well | Adam PJ, J Biol |
| cancer therapy and/or | as protein expression levels and localizations that are | Chem. 2003 Feb |
| diagnostic markers of | unique to cancer cells over normal breast epithelial cells. | 21; 278(8): 6482-9. |
| the disease | BCMP11/hAG3 shows the highest prevalence in | Epub 2002 Dec 10 |
| | breast cancers (74%) with a strong positive correlation with | |
| | estrogen receptor status. no mRNA or protein expression in | |
| | normal breast epithelia or stromal tissue | |
| | C4.4A, as a BCMP11-interacting protein. C4.4A | |
| | may therefore represent an autocrine receptor for BCMP11. | |
| 2. hAG-2 and hAG-3 | Yeast two-hybrid cloning identified metastasis-associated | Fletcher GC et al., |
| are human | GPI-anchored C4.4a protein and extracellular alpha- | Br J Cancer. 2003 |
| homologues of the | dystroglycan (DAG-1) as binding partners for both hAG-2 | Feb 24; 88(4): 579-85 |
| secreted Xenopus | and hAG-3, which if replicated in clinical oncology would | |
| laevis proteins XAG- | demonstrate a potential role in tumour metastasis through | |
| ½ (AGR-½); | the regulation of receptor adhesion and functioning. hAG-2 | |
| Breast tumor | and hAG-3 may therefore serve as useful molecular | |
| biomarkers | markers and/or potential therapeutic targets for hormone- | |
| | responsive breast tumors. | |
| 3. anterior gradient 2 | Serial analysis of gene expression and more recently | Missiaglia E., Int J |
| (AG2) (high | oligo/cDNA microarray technologies have been employed | Cancer. 2004 Oct |
| homology with AG3, | in order to identify genes involved in pancreatic neoplasia | 20; 112(1): 100-12 |
| lie adjacent to it) | that can be developed as diagnostic markers and drug | |
| Pancreatic cancer | targets for this dismal disease. | |
| 4. Co-expression of | hAG-2 has been found to be co-expressed with estrogen | Thompson DA et |
| hAG-2 with ER | receptor (ER) in breast cancer cell lines by using | al., Biochem |
| suggests that hAG-2 | suppression subtractive hybridization | Biophys Res |
| may be involved in | | Commun. 1998 Oct |
| the tumor biology | | 9; 251(1): 111-6 |
| specific to the well- | | |
| differentiated | | |
| phenotype of | | |
| hormonally- | | |
| responsive breast | | |
| cancers. | | |
| 5. C4.4A, a member | C4.4A was described as a metastasis-associated molecule. | Paret C et al., Int J |
| of the Ly6 family. It | C4.4A ligands are strongly expressed in tissues adjacent to | Cancer. 2005 Feb |
| has been detected | squamous epithelia of, e.g., tongue and esophagus, the | 23 |
| mainly on | expression pattern partly overlapping with laminin (LN) | |
| metastasizing | and complementing the C4.4A expression that is found | |
| carcinoma cells and | predominantly on the basal layers of squamous epithelium | |
| proposed to be | LN1 and LN5 are C4.4A ligands that galectin-3 associates | |
| involved in wound | with C4.4A and that C4.4A ligand binding confers a | |
| healing | migratory phenotype are well in line with the supposed | |
| | metastasis association. | |
| 6. MIG-C4-the | Gene products involved in normal urothelium-matrix | Smith BA et al., |
| human homologue of | interactions that could be tumor-invasion or suppressor- | Cancer Res. 2001 |
| the rat metastasis- | gene targets in the development of invasive and metastatic | Feb 15; 61(4): 1678-85 |
| associated C4.4A | tumor phenotypes. | |
| gene-malignant | | |
| progression | | |
| 7. Possible | Functional activity of hC4.4 A in tumor progression. | Seiter S et al., J |
| correlation between | Melanoma lines were incubated with human serum. | Invest Dermatol. |
| hC4.4 A and tumor | Whereas expression of hC4.4 was not influenced by heat- | 2001 |
| progression | inactivated human serum, all melanoma lines responded to | Feb; 116(2): 344-7 |
| | non inactivated human serum with up regulation of hC4.4 | |
| | A expression. Regulated expression with highest-level | |
| | expression on metastases is a feature that hC4.4 A shares | |
| | with the urokinase-type plasminogen activator receptor. | |
| 8. C4.4A with tumor | Expression of the human C4.4A was observed by RT-PCR | Wurfel J, et al |
| progression, human | and Northern blotting in placental tissue, skin, esophagus | Gene. 2001 Jan |
| C4.4A might well | and peripheral blood leukocytes, but not in brain, lung, | 10; 262(1-2): 35-41 |
| become a prognostic | liver, kidney, stomach, colon and lymphoid organs. Yet, | |
| marker and possibly | tumors derived from the latter tissues frequently contained | |
| a target of therapy. | C4.4A mRNA. As demonstrated for malignant melanoma, | |
| | C4.4A mRNA expression correlated with tumor | |
| | progression. While nevi were negative and only a minority | |
| | of primary malignant melanoma expressed C4.4A, all | |
| | metastases were C4.4A-positive | |
| marker for the | huXAG-1 is specifically found in cancerous colon cells and | WO9807749 |
| detection of | may therefore be a growth factor for colon cancer. In | |
| colorectal carcinoma: | particular, isolated nucleic acid molecules are provided | |
| a huXAG-1, | encoding the huXAG-1, huXAG-2 and huXAG-3 proteins. | |
| huXAG-2 and | | |
| huXAG-3 proteins | | |
| which are novel | | |
| human growth | | |
| factors. These | | |
| proteins share | | |
| homology with the | | |
| XAG protein of | | |
| Xenopus laevis and | | |
| can be found in colon | | |
| tissue | | |
| Involved in protein- | BCMP 11 is useful for the diagnosis, screening, treatment | WO03075014 |
| protein interactions | and prophylaxis of breast cancer, as well as compositions | |
| involving Breast | comprising BCMP 11, including vaccines and antibodies | |
| Cancer Membrane | that are immunospecific for BCMP 11. | |
| Proteins-7 and -11 | Human nucleic acid sequences - mRNA, cDNA, genome | |
| (BCMP-7 and | sequences - of ovarian tumor tissue, which code for gene | |
| BCMP-11). relates to | products or parts of these products, and to their use. Also | |
| complexes of the | polypeptides obtained by way of these sequences and to the | |
| interacting proteins, | use of same. | |
| antibodies to the | | |
| complexes, selected | | |
| interaction domains | | |
| of the protein-protein | | |
| interactions, methods | | |
| for screening for | | |
| agents which | | |
| modulate the protein- | | |
| protein interactions | | |
| and pharmaceutical | | |
| compositions | | |
| comprising active | | |
| agents that are | | |
| capable of | | |
| modulating the | | |
| protein-protein | | |
| interactions | | |

[1673] According to other optional embodiments of the present invention, variants of this cluster according to the present invention (amino acid and/or nucleic acid sequences of T94936) may optionally have one or more of the following utilities, some of which are related to utilities described above. It should be noted that these utilities are optionally and preferably suitable for human and non-human animals as subjects, except where otherwise noted.

[1674] A non-limiting example of such a utility is screening for and/or diagnosis of breast cancer in a subject, and/or disease prognosis, and/or monitoring the effectiveness of breast cancer therapy, by using at least one T94936 variant according to the present invention. Optionally and preferably, the method involves detecting a change in level and/or activity of the at least one variant.

[1675] Such use of the known protein is described with regard to PCT Application No. WO 03/087831, hereby incorporated by reference as if fully set forth herein.

[1676] Cluster T94936 belongs to a family of proteins which are known to have functions related to the cardiovascular system and functions, including but not limited to, AGR2. These functions are described below; one or more variants of cluster T94936 may optionally have one or more diagnostic utilities related to these functions.

[1677] Changes in AGR2 expression were indicated in breast cancer (Shen D, et al.: Loss of annexin A1 expression in human breast cancer detected by multiple high-throughput analyses. Biochem Biophys Res Commun. 2005 Jan. 7; 326(1):218-27.). AGR2 was found to be over-expressed in 89% of prostate carcinomas, but did not have prognostic significance (Kristiansen G, et al.: Expression profiling of microdissected matched prostate cancer samples reveals CD166/MEMD and CD24 as new prognostic markers for patient survival. J Pathol. 2005 February; 205(3):359-76.). However, one or more variants of T94936 may optionally have such prognostic significance.

[1678] It was identified as a reliable marker of borderline tumors. Interestingly, two of these genes, AGR2 and NPTX2, are physically linked to one another, mapping to p21.3 on chromosome 7 (Warrenfeltz et al. Gene expression profiling of epithelial ovarian tumours correlated with malignant potential: Molecular Cancer 2004, 3:27). It is a putative marker for prognosis of pancreatic cancer (Regine Brandt, et al.: DNA Microarray Analysis of Pancreatic Malignancies. Pancreatology 2004; 4:587-597; and also Edoardo Missiaglia, et al.: Analysis of gene expression in cancer cell lines identifies candidate markers for pancreatic tumorigenesis and metastasis. International Journal of Cancer (2004) Volume 112, Issue 1 Pages 100-112).

[1679] Table 168 below describes diagnostic utilities for the cluster T94936 that were found through microarrays, including the statistical significance thereof and a reference. One or more T94936 variants according to the present invention may optionally have one or more of these utilities.

TABLE 168

| | Statistical | |
|---|---|---|
| Diagnostic utility | significance | reference |
| Gene over expressed in Sporadic breast cancer (vs | 3E−4 | Van't Veer LJ, Friend SH |
| BRCA1 and BRCA2 mutated cancers); indicator | | Nature (2002) Gene expression |
| for hereditary breast cancers. | | profiling predicts clinical |
| | | outcome of breast cancer. |
| Gene over expressed in grade 1 breast cancer (vs. | 6E−7 | Van't Veer LJ, Friend SH |
| grade 3) | | Nature (2002) Gene expression |
| | | profiling predicts clinical |
| | | outcome of breast cancer. |
| Gene over expressed in negative Lymphocytic | 5.5E−7 | Van't Veer LJ, Friend SH |
| Infiltrate (vs. positive); negative indicator for | | Nature (2002) Gene expression |
| metastasis. | | profiling predicts clinical |
| | | outcome of breast cancer. |

[1680] Other non-limiting exemplary utilities for T94936 variants according to the present invention are described in greater detail below and also with regard to the previous section on clinical utility.

[1681] As noted above, contig T94936 features 3 transcript(s), which were listed in Table 164 above. A description of each variant protein according to the present invention is now provided.

[1682] Variant protein T94936_PEA_{—}1_PEA_{—}1_P2 (SEQ ID NO:427) according to the present invention has an amino acid sequence; it is encoded by transcript(s) T94936_PEA_{—}1_PEA_{—}1_T1 (SEQ ID NO:411). One or more alignments to one or more previously published protein sequences in the alignment table located on the attached CDROM. A brief description of the relationship of the variant protein according to the present invention to each such aligned protein is as follows:

[1683] Comparison report between T94936_PEA_{—}1_PEA_{—}1_P2 (SEQ ID NO:427) and Q8TD06 (SEQ ID NO:695) (SEQ ID NO:426):

[1684] 1. An isolated chimeric polypeptide encoding for T94936_PEA_{—}1_PEA_{—}1_P2 (SEQ ID NO:427), comprising a first amino acid sequence being at least 90% homologous to MMLHSALGLCLLLVTVSSNLAIAIKKEKRPPQTLSRGWGDDITWVQTYEEGLFYAQKSKKPLMVI HHLEDCQYSQALKKVFAQNEEIQEMAQNKFIMLNLMHETTDKNLSPDGQYVPRIMFVDPSLTVRA DIAGRYSNRLYTYEPRDLPL corresponding to amino acids 1-150 of Q8TD06 (SEQ ID NO:695) (SEQ ID NO:426), which also corresponds to amino acids 1-150 of T94936_PEA_{—}1_PEA_{—}1_P2 (SEQ ID NO:427).

[1685] The location of the variant protein was determined according to results from a number of different software programs and analyses, including analyses from SignalP and other specialized programs. The variant protein is believed to be located as follows with regard to the cell: secreted.

[1686] Variant protein T94936_PEA_{—}1_PEA_{—}1_P2 (SEQ ID NO:427) is encoded by the following transcript(s): T94936_PEA_{—}1_PEA_{—}1_T1 (SEQ ID NO:411). The coding portion of transcript T94936_PEA_{—}1_PEA_{—}1_T1 (SEQ ID NO:411) starts at position 76 and ends at position 525. The transcript also has the following SNPs as listed in Table 169 (given according to their position on the nucleotide sequence, with the alternative nucleic acid listed; the last column indicates whether the SNP is known or not; the presence of known SNPs in variant protein T94936_PEA_{—}1_PEA_{—}1_P2 (SEQ ID NO:427) sequence provides support for the deduced sequence of this variant protein according to the present invention).

TABLE 169
Nucleic acid SNPs

| SNP position on | | |
|---|---|---|
| nucleotide sequence | Alternative nucleic acid | Previously known SNP? |
| 158 | A -> G | No |
| 186 | A -> G | No |
| 385 | A -> G | No |

[1687] Variant protein T94936_PEA_{—}1_PEA_{—}1_P3 (SEQ ID NO:428) according to the present invention has an amino acid sequence; it is encoded by transcript(s) T94936_PEA_{—}1_PEA_{—}1_T2 (SEQ ID NO:412). One or more alignments to one or more previously published protein sequences are given at in the alignment table located on the attached CDROM. A brief description of the relationship of the variant protein according to the present invention to each such aligned protein is as follows:

[1688] Comparison report between T94936_PEA_{—}1_PEA_{—}1_P3 (SEQ ID NO:428) and Q8TD06 (SEQ ID NO:695) (SEQ ID NO:426):

[1689] 1. An isolated chimeric polypeptide encoding for T94936_PEA_{—}1_PEA_{—}1_P3 (SEQ ID NO:428), comprising a first amino acid sequence being at least 90% homologous to MMLHSALGLCLLLVTVSSNLAIAIKKEKRPPQTLSRGWGDDITWVQTYEEGLFYAQKSKKPLMVI HHLEDCQYSQALKKVFAQNEEIQEMAQNKFIMLNLMHETTDKNLSPDGQYVPRIMFV corresponding to amino acids 1-122 of Q8TD06 (SEQ ID NO:695) (SEQ ID NO:426), which also corresponds to amino acids 1-122 of T94936_PEA_{—}1_PEA_{—}1_P3 (SEQ ID NO:428), and a second amino acid sequence being at least 70%, optionally at least 80%, preferably at least 85%, more preferably at least 90% and most preferably at least 95% homologous to a polypeptide having the sequence GMYVISFHQIYKISRNQHSCFYF (SEQ ID NO: 660) corresponding to amino acids 123-145 of T94936_PEA_{—}1_PEA_{—}1_P3 (SEQ ID NO:428), wherein said first amino acid sequence and second amino acid sequence are contiguous and in a sequential order.

[1690] 2. An isolated polypeptide encoding for a tail of T94936_PEA_{—}1_PEA_{—}1_P3 (SEQ ID NO:428), comprising a polypeptide being at least 70%, optionally at least about 80%, preferably at least about 85%, more preferably at least about 90% and most preferably at least about 95% homologous to the sequence GMYVISFHQIYKISRNQHSCFYF (SEQ ID NO: 660) in T94936_PEA_{—}1_PEA_{—}1_P3 (SEQ ID NO:428).

[1691] The location of the variant protein was determined according to results from a number of different software programs and analyses, including analyses from SignalP and other specialized programs. The variant protein is believed to be located as follows with regard to the cell: secreted.

[1692] Variant protein T94936_PEA_{—}1_PEA_{—}1_P3 (SEQ ID NO:428) is encoded by the following transcript(s): T94936_PEA_{—}1_PEA_{—}1T2 (SEQ ID NO:412). The coding portion of transcript T94936_PEA_{—}1_PEA_{—}1_T2 (SEQ ID NO:412) starts at position 76 and ends at position 510. The transcript also has the following SNPs as listed in Table 170 (given according to their position on the nucleotide sequence, with the alternative nucleic acid listed; the last column indicates whether the SNP is known or not; the presence of known SNPs in variant protein T94936_PEA_{—}1_PEA_{—}1_P3 (SEQ ID NO:428) sequence provides support for the deduced sequence of this variant protein according to the present invention).

TABLE 170
Nucleic acid SNPs

| SNP position on | | |
|---|---|---|
| nucleotide sequence | Alternative nucleic acid | Previously known SNP? |
| 158 | A -> G | No |
| 186 | A -> G | No |
| 385 | A -> G | No |
| 746 | T -> C | No |
| 889 | A -> C | No |
| 889 | A -> G | No |
| 980 | A -> | No |
| 1006 | A -> | No |
| 1105 | A -> | No |
| 1356 | A -> G | No |

[1693] Variant protein T94936_PEA_{—}1_PEA_{—}1_P7 (SEQ ID NO:429) according to the present invention has an amino acid sequence; it is encoded by transcript(s) T94936_PEA_{—}1_PEA_{—}1_T5 (SEQ ID NO:413). One or more alignments to one or more previously published protein sequences are given in the alignment table located on the attached CDROM. A brief description of the relationship of the variant protein according to the present invention to each such aligned protein is as follows:

[1694] Comparison report between T94936_PEA_{—}1_PEA_{—}1_P7 (SEQ ID NO:429) and Q8TD06 (SEQ ID NO:695) (SEQ ID NO:426):

[1695] 1. An isolated chimeric polypeptide encoding for T94936_PEA_{—}1_PEA_{—}1_P7 (SEQ ID NO:429), comprising a first amino acid sequence being at least 90% homologous to MMLHSALGLCLLLVTVSSNLAIAIKKEKRPPQTLSRGWGDDITWVQTYEEGLFYAQK corresponding to amino acids 1-57 of Q8TD06 (SEQ ID NO:695) (SEQ ID NO:426), which also corresponds to amino acids 1-57 of T94936_PEA_{—}1_PEA_{—}1_P7 (SEQ ID NO:429), and a second amino acid sequence being at least 70%, optionally at least 80%, preferably at least 85%, more preferably at least 90% and most preferably at least 95% homologous to a polypeptide having the sequence RSH corresponding to amino acids 58-60 of T94936_PEA_{—}1_PEA_{—}1_P7 (SEQ ID NO:429), wherein said first amino acid sequence and second amino acid sequence are contiguous and in a sequential order.

[1696] The location of the variant protein was determined according to results from a number of different software programs and analyses, including analyses from SignalP and other specialized programs. The variant protein is believed to be located as follows with regard to the cell: secreted.

[1697] Variant protein T94936_PEA_{—}1_PEA_{—}1_P7 (SEQ ID NO:429) is encoded by the following transcript(s): T94936_PEA_{—}1_PEA_{—}1_T5 (SEQ ID NO:413). The coding portion of transcript T94936_PEA_{—}1_PEA_{—}1_T5 (SEQ ID NO:413) starts at position 76 and ends at position 255. The transcript also has the following SNPs as listed in Table 171 (given according to their position on the nucleotide sequence, with the alternative nucleic acid listed; the last column indicates whether the SNP is known or not; the presence of known SNPs in variant protein T94936_PEA_{—}1_PEA_{—}1_P7 (SEQ ID NO:429) sequence provides support for the deduced sequence of this variant protein according to the present invention).

TABLE 171
Nucleic acid SNPs

| SNP position on | | |
|---|---|---|
| nucleotide sequence | Alternative nucleic acid | Previously known SNP? |
| 158 | A -> G | No |
| 186 | A -> G | No |
| 381 | A -> G | No |
| 581 | A -> G | No |

[1698] Table 172 below describes the starting and ending position of T94936_PEA_{—}1_PEA_{—}1_node_{—}14 (SEQ ID NO:415) on the relevant transcript. Experimental results for this segment are described below.

TABLE 172
Segment location on transcripts

| | Segment | |
|---|---|---|
| | starting | Segment |
| Transcript name | position | ending position |
| T94936_PEA_1_PEA_1_T2 (SEQ ID | 443 | 803 |
| NO: 412) | | |

[1699] Table 173 below describes the starting and ending position of T94936_PEA_{—}1_PEA_{—}1_node_{—}20 (SEQ ID NO:417) on each of the relevant transcripts. Experimental results for this segment are described below.

TABLE 173
Segment location on transcripts

| | Segment | |
|---|---|---|
| | starting | Segment |
| Transcript name | position | ending position |
| T94936_PEA_1_PEA_1_T2 (SEQ ID | 1298 | 1526 |
| NO: 412) | | |
| T94936_PEA_1_PEA_1_T5 (SEQ ID | 523 | 751 |
| NO: 413) | | |

Expression of Homo sapiens breast cancer membrane protein 11 (BCMP11) T94936 transcripts which are detectable by amplicon as depicted in sequence name T94936 seg14 (SEQ ID NO: 563) in different normal tissues

[1700] Expression of Homo sapiens breast cancer membrane protein 11 (BCMP11) transcripts detectable by or according to T94936 seg14 (SEQ ID NO: 563) amplicon and primers: T94936 seg14F (SEQ ID NO:561) and T94936 seg14R (SEQ ID NO:562) was measured by real time PCR. In parallel the expression of four housekeeping genes—RPL19 (GenBank Accession No. NM_{—}000981 (SEQ ID NO:7); RPL19 amplicon (SEQ ID NO: 38)), TATA box (GenBank Accession No. NM_{—}003194 (SEQ ID NO:2); TATA amplicon (SEQ ID NO: 53)), Ubiquitin (GenBank Accession No. BC000449 (SEQ ID NO:9); amplicon—Ubiquitin-amplicon (SEQ ID NO:50)) and SDHA (GenBank Accession No. NM_{—}004168 (SEQ ID NO:4); amplicon—SDHA-amplicon (SEQ ID NO:29)) was measured similarly. For each RT sample, the expression of the above amplicon was normalized to the geometric mean of the quantities of the housekeeping genes. The normalized quantity of each RT sample was then divided by the median of the quantities of the breast samples (Sample Nos. 33-35 Table 7, “Tissue samples in normal panel”), to obtain a value of relative expression of each sample relative to median of the breast samples.

[1701] FIG. 66 is a histogram showing expression of Homo sapiens breast cancer membrane protein 11 (BCMP11) T94936 transcripts which are detectable by amplicon as depicted in sequence name T94936 seg14 (SEQ ID NO: 563) in different normal tissues

[1702] Primers:

Forward primer T94936 seg14F (SEQ ID NO:561):
TACAAAATTAGTAGAAATCAGCATTCTTGC
Reverse primer T94936 seg14R (SEQ ID NO:562):
TGTAGAACTAACAAGAGCTGATATTATTGGAT
Amplicon T94936 seg14 (SEQ ID NO:563):
TACAAAATTAGTAGAAATCAGCATTCTTGCTTTTATTTTTAAATGCTAGT
TCAAGTACTATTCTTTTTAAAGAGAAGTCATTTCTAATCCAATAATATCA
GCTCTTGTTAGTTCTACA

Expression of Homo sapiens breast cancer membrane protein 11 (BCMP11) T94936 transcripts which are detectable by amplicon as depicted in sequence name T94936 seg14 (SEQ ID NO: 563) in normal and cancerous colon tissues

[1703] Expression of Homo sapiens breast cancer membrane protein 11 (BCMP11) transcripts detectable by or according to seg14, T94936 seg14 (SEQ ID NO: 563) amplicon and primers T94936 seg14F (SEQ ID NO:561) and T94936 seg14R (SEQ ID NO:562) was measured by real time PCR. In parallel the expression of four housekeeping genes—PBGD (GenBank Accession No. BC019323 (SEQ ID NO:6); amplicon—PBGD-amplicon (SEQ ID NO:32)), HPRT1 (GenBank Accession No. NM_{—}000194 (SEQ ID NO:5); amplicon—HPRT1-amplicon (SEQ ID NO:35)), G6PD (GenBank Accession No. NM_{—}000402 (SEQ ID NO:8); G6PD amplicon (SEQ ID NO: 44)), RPS27A (GenBank Accession No. NM_{—}002954 (SEQ ID NO:1); RPS27A amplicon (SEQ ID NO: 47)) was measured similarly. For each RT sample, the expression of the above amplicon was normalized to the geometric mean of the quantities of the housekeeping genes. The normalized quantity of each RT sample was then divided by the median of the quantities of the normal post-mortem (PM) samples (Sample Nos. 41, 52, 62-67, 69-71, Table 4, above, “Tissue samples in colon cancer testing panel”), to obtain a value of fold differential expression for each sample relative to median of the normal PM samples.

[1704] In one experiment that was carried out no differential expression in the cancerous samples relative to the normal PM samples was observed.

[1705] Primer pairs are also optionally and preferably encompassed within the present invention; for example, for the above experiment, the following primer pair was used as a non-limiting illustrative example only of a suitable primer pair: T94936 seg14F (SEQ ID NO:561) forward primer; and T94936 seg14R (SEQ ID NO:562) reverse primer.

[1706] The present invention also preferably encompasses any amplicon obtained through the use of any suitable primer pair; for example, for the above experiment, the following amplicon was obtained as a non-limiting illustrative example only of a suitable amplicon: T94936 seg14 (SEQ ID NO: 563).

[1707] Primers:

Forward primer T94936 seg14F (SEQ ID NO:561):
TACAAAATTAGTAGAAATCAGCATTCTTGC
Reverse primer T94936 seg14R (SEQ ID NO:562):
TGTAGAACTAACAAGAGCTGATATTATTGGAT
Amplicon T94936 seg14 (SEQ ID NO:563):
TACAAAATTAGTAGAAATCAGCATTCTTGCTTTTATTTTTAAATGCTAGT
TCAAGTACTATTCTTTTTAAAGAGAAGTCATTTCTAATCCAATAATATCA
GCTCTTGTTAGTTCTACA

Expression of Homo sapiens breast cancer membrane protein 11 (BCMP11) T94936 transcripts which are detectable by amplicon as depicted in sequence name T94936 seg14 (SEQ ID NO: 563) in normal and cancerous lung tissues

[1708] Expression of Homo sapiens breast cancer membrane protein 11 (BCMP11) transcripts detectable by or according to seg14, T94936 seg14 (SEQ ID NO: 563) amplicon and primers T94936 seg14F (SEQ ID NO:561) and T94936 seg14R (SEQ ID NO:562) was measured by real time PCR. In parallel the expression of four housekeeping genes—PBGD (GenBank Accession No. BC019323 (SEQ ID NO:6); amplicon—PBGD-amplicon (SEQ ID NO:32)), HPRT1 (GenBank Accession No. NM_{—}000194 (SEQ ID NO:5); amplicon—HPRT1-amplicon (SEQ ID NO:35)), Ubiquitin (GenBank Accession No. BC000449 (SEQ ID NO:9); amplicon—Ubiquitin-amplicon (SEQ ID NO:50)) and SDHA (GenBank Accession No. NM_{—}004168 (SEQ ID NO:4); amplicon—SDHA-amplicon (SEQ ID NO:29)), was measured similarly. For each RT sample, the expression of the above amplicon was normalized to the geometric mean of the quantities of the housekeeping genes. The normalized quantity of each RT sample was then divided by the median of the quantities of the normal post-mortem (PM) samples (Sample Nos. 47-50, 90-93, 96-99, Table 5, above, “Tissue samples in lung cancer testing panel”), to obtain a value of fold differential expression for each sample relative to median of the normal PM samples.

[1709] In one experiment that was carried out no differential expression in the cancerous samples relative to the normal PM samples was observed.

[1710] Primer pairs are also optionally and preferably encompassed within the present invention; for example, for the above experiment, the following primer pair was used as a non-limiting illustrative example only of a suitable primer pair: T94936 seg14F (SEQ ID NO:561) forward primer; and T94936 seg14R (SEQ ID NO:562) reverse primer.

[1711] The present invention also preferably encompasses any amplicon obtained through the use of any suitable primer pair; for example, for the above experiment, the following amplicon was obtained as a non-limiting illustrative example only of a suitable amplicon: T94936 seg14 (SEQ ID NO: 563).

[1712] Primers:

Forward primer T94936 seg14F (SEQ ID NO:561):
TACAAAATTAGTAGAAATCAGCATTCTTGC
Reverse primer T94936 seg14R (SEQ ID NO:562):
TGTAGAACTAACAAGAGCTGATATTATTGGAT
Amplicon T94936 seg14 (SEQ ID NO:563):
TACAAAATTAGTAGAAATCAGCATTCTTGCTTTTATTTTTAAATGCTAGT
TCAAGTACTATTCTTTTTAAAGAGAAGTCATTTCTAATCCAATAATATCA
GCTCTTGTTAGTTCTACA

Expression of Homo sapiens breast cancer membrane protein 11 (BCMP11) T94936 transcripts which are detectable by amplicon as depicted in sequence name T94936 seg14 (SEQ ID NO: 563) in normal and cancerous breast tissues

[1713] Expression of Homo sapiens breast cancer membrane protein 11 (BCMP11) transcripts detectable by or according to seg14, T94936 seg14 (SEQ ID NO: 563) amplicon and primers T94936 seg14F (SEQ ID NO:561) and T94936 seg14R (SEQ ID NO:562) was measured by real time PCR. In parallel the expression of four housekeeping genes—PBGD (GenBank Accession No. BC019323 (SEQ ID NO:6); amplicon—PBGD-amplicon (SEQ ID NO:32)), HPRT1 (GenBank Accession No. NM_{—}000194 (SEQ ID NO:5); amplicon—HPRT1-amplicon (SEQ ID NO:35)), SDHA (GenBank Accession No. NM_{—}004168 (SEQ ID NO:4); amplicon—SDHA-amplicon (SEQ ID NO:29)), G6PD (GenBank Accession No. NM_{—}000402 (SEQ ID NO:8); G6PD amplicon (SEQ ID NO: 44)), was measured similarly. For each RT sample, the expression of the above amplicon was normalized to the geometric mean of the quantities of the housekeeping genes. The normalized quantity of each RT sample was then divided by the median of the quantities of the normal post-mortem (PM) samples (Sample Nos. 56-60, 63-67, Table 6, above, “Tissue samples in breast cancer testing panel”), to obtain a value of fold up-regulation for each sample relative to median of the normal PM samples.

[1714] FIG. 67 is a histogram showing over expression of the above-indicated Homo sapiens breast cancer membrane protein 11 (BCMP11) transcripts in cancerous breast samples relative to the normal samples. Values represent the average of duplicate experiments. Error bars indicate the minimal and maximal values obtained.

[1715] As is evident from FIG. 67, the expression of Homo sapiens breast cancer membrane protein 11 (BCMP11) transcripts detectable by the above amplicon in cancer samples was significantly higher than in the non-cancerous samples (Sample Nos. 56-60, 63-67 Table 6, “Tissue samples in breast cancer testing panel”). Notably an over-expression of at least 5 fold was found in 16 out of 28 adenocarcinoma samples.

[1716] Statistical analysis was applied to verify the significance of these results, as described below.

[1717] The P value for the difference in the expression levels of Homo sapiens breast cancer membrane protein 11 (BCMP11) transcripts detectable by the above amplicon in breast cancer samples versus the normal tissue samples was determined by T test as 5.76E-02.

[1718] Threshold of 5 fold overexpression was found to differentiate between cancer and normal samples with P value of 1.13E-02 as checked by exact fisher test. The above values demonstrate statistical significance of the results.

[1719] By dissecting the patient's population into two age groups, indicated below the graph, we demonstrate that the transcripts detected by the above amplicon are highly expressed mainly in patients with an age above 50

[1720] Primer pairs are also optionally and preferably encompassed within the present invention; for example, for the above experiment, the following primer pair was used as a non-limiting illustrative example only of a suitable primer pair: T94936 seg14F (SEQ ID NO:561) forward primer; and T94936 seg14R (SEQ ID NO:562) reverse primer.

[1721] The present invention also preferably encompasses any amplicon obtained through the use of any suitable primer pair; for example, for the above experiment, the following amplicon was obtained as a non-limiting illustrative example only of a suitable amplicon: T94936 seg14 (SEQ ID NO: 563).

[1722] Primers:

Forward primer T94936 seg14F (SEQ ID NO:561):
TACAAAATTAGTAGAAATCAGCATTCTTGC
Reverse primer T94936 seg14R (SEQ ID NO:562):
TGTAGAACTAACAAGAGCTGATATTATTGGAT
Amplicon T94936 seg14 (SEQ ID NO:563):
TACAAAATTAGTAGAAATCAGCATTCTTGCTTTTATTTTTAAATGCTAGT
TCAAGTACTATTCTTTTTAAAGAGAAGTCATTTCTAATCCAATAATATCA
GCTCTTGTTAGTTCTACA

Expression of Homo sapiens breast cancer membrane protein 11 (BCMP11) T94936 transcripts which are detectable by amplicon as depicted in sequence name T94936 seg14 (SEQ ID NO: 563) in normal and cancerous ovary tissues

[1723] Expression of Homo sapiens breast cancer membrane protein 11 (BCMP11) transcripts detectable by or according to seg14, T94936 seg14 (SEQ ID NO: 563) amplicon and primers T94936 seg14F (SEQ ID NO:561) and T94936 seg14R (SEQ ID NO:562) was measured by real time PCR. In parallel the expression of four housekeeping genes—PBGD (GenBank Accession No. BC019323 (SEQ ID NO:6); amplicon—PBGD-amplicon (SEQ ID NO:32)), HPRT1 (GenBank Accession No. NM_{—}000194 (SEQ ID NO:5); amplicon—HPRT1-amplicon (SEQ ID NO:35)), SDHA (GenBank Accession No. NM_{—}004168 (SEQ ID NO:4); amplicon—SDHA-amplicon (SEQ ID NO:29)), and GAPDH (GenBank Accession No. BC026907 (SEQ ID NO:3); GAPDH amplicon (SEQ ID NO: 41) was measured similarly. For each RT sample, the expression of the above amplicon was normalized to the geometric mean of the quantities of the housekeeping genes. The normalized quantity of each RT sample was then divided by the average of the quantities of the normal post-mortem (PM) samples (Sample Nos. 45, 46, 48, 71, Table 3, above, “Tissue samples in ovarian cancer testing panel”), to obtain a value of fold up-regulation for each sample relative to median of the normal PM samples.

[1724] FIG. 68 is a histogram showing over expression of the above-indicated Homo sapiens breast cancer membrane protein 11 (BCMP11) transcripts in cancerous ovary samples relative to the normal samples. Values represent the average of duplicate experiments. Error bars indicate the minimal and maximal values obtained.

[1725] As is evident from FIG. 68, the expression of Homo sapiens breast cancer membrane protein 11 (BCMP11) transcripts detectable by the above amplicon in cancer samples was significantly higher than in the non-cancerous samples (Sample Nos. 45, 46, 48, 71 Table 3, “Tissue samples in ovarian cancer testing panel”). Notably an over-expression of at least 10 fold was found in 13 out of 30 serous adenocarcinoma samples and 6 out of 6 mucinous cancer samples, 1 out of the 2 clear cell samples and 3 out of the 3 borderline samples.

[1726] Statistical analysis was applied to verify the significance of these results, as described below.

[1727] The P value for the difference in the expression levels of Homo sapiens breast cancer membrane protein 11 (BCMP11) transcripts detectable by the above amplicon in ovary serous cancer samples versus the normal tissue samples was determined by T test as 6.90E-03.

[1728] The P value for the difference in the expression levels of Homo sapiens breast cancer membrane protein 11 (BCMP11) transcripts detectable by the above amplicon in ovary mucinous cancer samples versus the normal tissue samples was determined by T test as 7.18E-03.

[1729] The above values demonstrate statistical significance of the results.

[1730] These results also demonstrate the transcripts detected by the above amplicon are highly expressed mainly in Mucinous ovarian cancer. Also, patients having serous adenocarcinoma with an age below 50 show higher expression of this variant.

[1731] Primer pairs are also optionally and preferably encompassed within the present invention; for example, for the above experiment, the following primer pair was used as a non-limiting illustrative example only of a suitable primer pair: T94936 seg14F (SEQ ID NO:561) forward primer; and T94936 seg14R (SEQ ID NO:562) reverse primer.

[1732] The present invention also preferably encompasses any amplicon obtained through the use of any suitable primer pair; for example, for the above experiment, the following amplicon was obtained as a non-limiting illustrative example only of a suitable amplicon: T94936 seg14 (SEQ ID NO: 563).

[1733] Primers:

Forward primer T94936 seg14F (SEQ ID NO:561):
TACAAAATTAGTAGAAATCAGCATTCTTGC
Reverse primer T94936 seg14R (SEQ ID NO:562):
TGTAGAACTAACAAGAGCTGATATTATTGGAT
Amplicon T94936 seg14 (SEQ ID NO:563):
TACAAAATTAGTAGAAATCAGCATTCTTGCTTTTATTTTTAAATGCTAGT
TCAAGTACTATTCTTTTTAAAGAGAAGTCATTTCTAATCCAATAATATCA
GCTCTTGTTAGTTCTACA

Expression of Homo sapiens breast cancer membrane protein 11 (BCMP11) T94936 transcripts which are detectable by amplicon as depicted in sequence name T94936 seg20 (SEQ ID NO: 432) in normal and cancerous ovary tissues

[1734] Expression of Homo sapiens breast cancer membrane protein 11 (BCMP11) transcripts detectable by or according to seg20-T94936 seg20 (SEQ ID NO: 432) amplicon and primers T94936 seg20F (SEQ ID NO: 430) and T94936 seg20R (SEQ ID NO: 431) was measured by real time PCR. In parallel the expression of four housekeeping genes—PBGD (GenBank Accession No. BC019323 (SEQ ID NO:6); amplicon—PBGD-amplicon (SEQ ID NO:32)), HPRT1 (GenBank Accession No. NM_{—}000194 (SEQ ID NO:5); amplicon—HPRT1-amplicon (SEQ ID NO:35)), SDHA (GenBank Accession No. NM_{—}004168 (SEQ ID NO:4); amplicon—SDHA-amplicon (SEQ ID NO:29)) and GAPDH (GenBank Accession No. BC026907 (SEQ ID NO:3); GAPDH amplicon (SEQ ID NO: 41) was measured similarly. For each RT sample, the expression of the above amplicon was normalized to the geometric mean of the quantities of the housekeeping genes. The normalized quantity of each RT sample was then divided by the median of the quantities of the normal post-mortem (PM) samples (Sample Nos. 45, 46, 48, 71, Table 3, above, “Tissue samples in ovarian cancer testing panel”), to obtain a value of fold up-regulation for each sample relative to median of the normal PM samples.

[1735] FIG. 69 is a histogram showing over expression of the above-indicated Homo sapiens breast cancer membrane protein 11 (BCMP11) transcripts in cancerous ovary samples relative to the normal samples.

[1736] As is evident from FIG. 69, the expression of Homo sapiens breast cancer membrane protein 11 (BCMP11) transcripts detectable by the above amplicon in cancer samples was significantly higher than in the non-cancerous samples (Sample Nos. 45, 46, 48, 71 Table 3, “Tissue samples in ovarian cancer testing panel”). Notably an over-expression of at least 10 fold was found in 10 out of 30 serous adenocarcinoma samples and 6 out of 6 mucinous adenocarcinoma samples, 1 out of the 2 clear cell samples and 3 out of the 3 borderline samples.

[1737] Statistical analysis was applied to verify the significance of these results, as described below.

[1738] The P value for the difference in the expression levels of Homo sapiens breast cancer membrane protein 11 (BCMP11) transcripts detectable by the above amplicon(s) in ovary serous cancer samples versus the normal tissue samples was determined by T test as 3.84E-03.

[1739] The P value for the difference in the expression levels of Homo sapiens breast cancer membrane protein 11 (BCMP11) transcripts detectable by the above amplicon(s) in ovary mucinous cancer samples versus the normal tissue samples was determined by T test as 5.44E-03. The above values demonstrate statistical significance of the results.

[1740] These results demonstrate the transcripts detected by the above amplicon are highly expressed mainly in Mucinous ovarian cancer. Also, patients having serous adenocarcinoma with an age below 50 show higher expression of this variant

[1741] Primer pairs are also optionally and preferably encompassed within the present invention; for example, for the above experiment, the following primer pair was used as a non-limiting illustrative example only of a suitable primer pair: T94936 seg20F (SEQ ID NO: 430) forward primer; and T94936 seg20R (SEQ ID NO: 431) reverse primer.

[1742] The present invention also preferably encompasses any amplicon obtained through the use of any suitable primer pair; for example, for the above experiment, the following amplicon was obtained as a non-limiting illustrative example only of a suitable amplicon: T94936 seg20 (SEQ ID NO: 432).

[1743] Primers:

Forward primer T94936 seg20F (SEQ ID NO:430):
AAAGCATTAAGACTTATTCAGTCAGAGC
Reverse primer T94936 seg20R (SEQ ID NO:431):
TCAATGTGCCAGAGGTTTTCTTC
Amplicon T94936 seg20 (SEQ ID NO:432):
AAAGCATTAAGACTTATTCAGTCAGAGCTATAAGAGATGATAGAAAAAAG
CCTTCACTTCAAAGAAGTCAAATTTCATGAAGAAAACCTCTGGCACATTG
A

Expression of Homo sapiens breast cancer membrane protein 11 (BCMP11) T94936 transcripts which are detectable by amplicon as depicted in sequence name T94936 seg20 (SEQ ID NO: 432) in normal and cancerous breast tissues

[1744] Expression of Homo sapiens breast cancer membrane protein 11 (BCMP11) transcripts detectable by or according to seg20-T94936 seg20 (SEQ ID NO: 432) amplicon and primers T94936 seg20F (SEQ ID NO: 430) and T94936 seg20R (SEQ ID NO: 431) was measured by real time PCR. In parallel the expression of four housekeeping genes—PBGD (GenBank Accession No. BC019323 (SEQ ID NO:6); amplicon—PBGD-amplicon (SEQ ID NO:32)), HPRT1 (GenBank Accession No. NM_{—}000194 (SEQ ID NO:5); amplicon—HPRT1-amplicon (SEQ ID NO:35)), SDHA (GenBank Accession No. NM_{—}004168 (SEQ ID NO:4); amplicon—SDHA-amplicon (SEQ ID NO:29)), G6PD (GenBank Accession No. NM_{—}000402 (SEQ ID NO:8); G6PD amplicon (SEQ ID NO: 44)), was measured similarly. For each RT sample, the expression of the above amplicon was normalized to the geometric mean of the quantities of the housekeeping genes. The normalized quantity of each RT sample was then divided by the median of the quantities of the normal post-mortem (PM) samples (Sample Nos. 56-60, 63-67, Table 6, above, “Tissue samples in breast cancer testing panel”), to obtain a value of fold up-regulation for each sample relative to median of the normal PM samples.

[1745] FIG. 70 is a histogram showing over expression of the above-indicated Homo sapiens breast cancer membrane protein 11 (BCMP11) transcripts in cancerous breast samples relative to the normal samples.

[1746] As is evident from FIG. 70, the expression of Homo sapiens breast cancer membrane protein 11 (BCMP11) transcripts detectable by the above amplicon in cancer samples was significantly higher than in the non-cancerous samples (Sample Nos. 56-60, 63-67 Table 6, “Tissue samples in breast cancer testing panel”). Notably an over-expression of at least 5 fold was found in 16 out of 28 adenocarcinoma samples.

[1747] Statistical analysis was applied to verify the significance of these results, as described below.

[1748] The P value for the difference in the expression levels of Homo sapiens breast cancer membrane protein 11 (BCMP11) transcripts detectable by the above amplicon in breast cancer samples versus the normal tissue samples was determined by T test as 8.64E-03.

[1749] Threshold of 5 fold overexpression was found to differentiate between cancer and normal samples with P value of 1.13E-02 as checked by exact fisher test. The above values demonstrate statistical significance of the results.

[1750] By dissecting the patient's population into two age groups (indicated below the graph), we demonstrate that the above amplicon is highly expressed mainly in patients with an age above 50.

[1751] Primer pairs are also optionally and preferably encompassed within the present invention; for example, for the above experiment, the following primer pair was used as a non-limiting illustrative example only of a suitable primer pair: T94936 seg20F (SEQ ID NO: 430) forward primer; and T94936 seg20R (SEQ ID NO: 431) reverse primer.

[1752] The present invention also preferably encompasses any amplicon obtained through the use of any suitable primer pair; for example, for the above experiment, the following amplicon was obtained as a non-limiting illustrative example only of a suitable amplicon: T94936 seg20 (SEQ ID NO: 432).

[1753] Primers:

Forward primer T94936 seg20F (SEQ ID NO:430):
AAAGCATTAAGACTTATTCAGTCAGAGC
Reverse primer T94936 seg20R (SEQ ID NO:431):
TCAATGTGCCAGAGGTTTTCTTC
Amplicon T94936 seg20 (SEQ ID NO:432):
AAAGCATTAAGACTTATTCAGTCAGAGCTATAAGAGATGATAGAAAAAAG
CCTTCACTTCAAAGAAGTCAAATTTCATGAAGAAAACCTCTGGCACATTG
A

Expression of Homo sapiens breast cancer membrane protein 11 (BCMP11) T94936 transcripts which are detectable by amplicon as depicted in sequence name T94936 seg20 (SEQ ID NO: 432) in different normal tissues

[1754] Expression of Homo sapiens breast cancer membrane protein 11 (BCMP11) transcripts detectable by or according to T94936 seg20 (SEQ ID NO: 432) amplicon and primers: T94936 seg20F (SEQ ID NO: 430) and T94936 seg20R (SEQ ID NO: 431) was measured by real time PCR. In parallel the expression of four housekeeping genes—RPL19 (GenBank Accession No. NM_{—}000981 (SEQ ID NO:7); RPL19 amplicon (SEQ ID NO: 38)), TATA box (GenBank Accession No. NM_{—}003194 (SEQ ID NO:2); TATA amplicon (SEQ ID NO: 53)), Ubiquitin (GenBank Accession No. BC000449 (SEQ ID NO:9); amplicon—Ubiquitin-amplicon (SEQ ID NO:50)) and SDHA (GenBank Accession No. NM_{—}004168 (SEQ ID NO:4); amplicon—SDHA-amplicon (SEQ ID NO:29)) was measured similarly. For each RT sample, the expression of the above amplicon was normalized to the geometric mean of the quantities of the housekeeping genes. The normalized quantity of each RT sample was then divided by the median of the quantities of the breast samples (Sample Nos. 33-35 Table 7, “Tissue samples in normal panel”), to obtain a value of relative expression of each sample relative to median of the breast samples.

[1755] FIG. 71 is a histogram showing Expression of Homo sapiens breast cancer membrane protein 11 (BCMP11) T94936 transcripts which are detectable by amplicon as depicted in sequence name T94936 seg20 (SEQ ID NO: 432) in different normal tissues

[1756] Primers:

Forward primer T94936 seg20F (SEQ ID NO:430):
AAAGCATTAAGACTTATTCAGTCAGAGC
Reverse primer T94936 seg20R (SEQ ID NO:431):
TCAATGTGCCAGAGGTTTTCTTC
Amplicon T94936 seg20 (SEQ ID NO:432):
AAAGCATTAAGACTTATTCAGTCAGAGCTATAAGAGATGATAGAAAAAAG
CCTTCACTTCAAAGAAGTCAAATTTCATGAAGAAAACCTCTGGCACATTG
A

### Description for Cluster HSTGFB1

[1757] Cluster HSTGFB1 features 6 transcript(s) and 24 segment(s) of interest, the names for which are given in Tables 174 and 175. The selected protein variants are given in table 176.

TABLE 174
Transcripts of interest
Transcript Name

HSTGFB1_T5 (SEQ ID NO: 433)
HSTGFB1_T6 (SEQ ID NO: 434)
HSTGFB1_T8 (SEQ ID NO: 435)
HSTGFB1_T9 (SEQ ID NO: 436)
HSTGFB1_T11 (SEQ ID NO: 437)
HSTGFB1_T14 (SEQ ID NO: 438)

TABLE 175
Segments of interest

Segment Name

| | |
|---|---|
| HSTGFB1_node_0 (SEQ ID NO: 439) | HSTGFB1_T5 (SEQ ID NO: 433), |
| | HSTGFB1_T6 (SEQ ID NO: 434), |
| | HSTGFB1_T8 (SEQ ID NO: 435), |
| | HSTGFB1_T9 (SEQ ID NO: 436), |
| | HSTGFB1_T11 (SEQ ID NO: 437) and |
| | HSTGFB1_T14 (SEQ ID NO: 438) |
| HSTGFB1_node_2 (SEQ ID NO: 440) | HSTGFB1_T5 (SEQ ID NO: 433), |
| | HSTGFB1_T6 (SEQ ID NO: 434), |
| | HSTGFB1_T8 (SEQ ID NO: 435), |
| | HSTGFB1_T9 (SEQ ID NO: 436), |
| | HSTGFB1_T11 (SEQ ID NO: 437) and |
| | HSTGFB1_T14 (SEQ ID NO: 438) |
| HSTGFB1_node_3 (SEQ ID NO: 441) | HSTGFB1_T5 (SEQ ID NO: 433), |
| | HSTGFB1_T6 (SEQ ID NO: 434), |
| | HSTGFB1_T8 (SEQ ID NO: 435), |
| | HSTGFB1_T9 (SEQ ID NO: 436), |
| | HSTGFB1_T11 (SEQ ID NO: 437) and |
| | HSTGFB1_T14 (SEQ ID NO: 438) |
| HSTGFB1_node_4 (SEQ ID NO: 442) | HSTGFB1_T5 (SEQ ID NO: 433), |
| | HSTGFB1_T6 (SEQ ID NO: 434), |
| | HSTGFB1_T8 (SEQ ID NO: 435), |
| | HSTGFB1_T9 (SEQ ID NO: 436), |
| | HSTGFB1_T11 (SEQ ID NO: 437) and |
| | HSTGFB1_T14 (SEQ ID NO: 438) |
| HSTGFB1_node_7 (SEQ ID NO: 443) | HSTGFB1_T5 (SEQ ID NO: 433), |
| | HSTGFB1_T6 (SEQ ID NO: 434), |
| | HSTGFB1_T8 (SEQ ID NO: 435), |
| | HSTGFB1_T9 (SEQ ID NO: 436), |
| | HSTGFB1_T11 (SEQ ID NO: 437) and |
| | HSTGFB1_T14 (SEQ ID NO: 438) |
| HSTGFB1_node_9 (SEQ ID NO: 444) | HSTGFB1_T5 (SEQ ID NO: 433), |
| | HSTGFB1_T6 (SEQ ID NO: 434), |
| | HSTGFB1_T8 (SEQ ID NO: 435), |
| | HSTGFB1_T9 (SEQ ID NO: 436), |
| | HSTGFB1_T11 (SEQ ID NO: 437) and |
| | HSTGFB1_T14 (SEQ ID NO: 438) |
| HSTGFB1_node_15 (SEQ ID NO: 445) | HSTGFB1_T5 (SEQ ID NO: 433) |
| HSTGFB1_node_22 (SEQ ID NO: 446) | HSTGFB1_T5 (SEQ ID NO: 433), |
| | HSTGFB1_T6 (SEQ ID NO: 434), |
| | HSTGFB1_T8 (SEQ ID NO: 435), |
| | HSTGFB1_T9 (SEQ ID NO: 436), |
| | HSTGFB1_T11 (SEQ ID NO: 437) and |
| | HSTGFB1_T14 (SEQ lD NO: 438) |
| HSTGFB1_node_26 (SEQ ID NO: 447) | HSTGFB1_T5 (SEQ ID NO: 433), |
| | HSTGFB1_T6 (SEQ ID NO: 434), |
| | HSTGFB1_T11 (SEQ ID NO: 437) and |
| | HSTGFB1_T14 (SEQ ID NO: 438) |
| HSTGFB1_node_28 (SEQ ID NO: 448) | HSTGFB1_T5 (SEQ ID NO: 433), |
| | HSTGFB1_T6 (SEQ ID NO: 434), |
| | HSTGFB1_T11 (SEQ ID NO: 437) and |
| | HSTGFB1_T14 (SEQ ID NO: 438) |
| HSTGFB1_node_31 (SEQ ID NO: 449) | HSTGFB1_T9 (SEQ ID NO: 436) |
| HSTGFB1_node_33 (SEQ ID NO: 450) | HSTGFB1_T8 (SEQ ID NO: 435) |
| HSTGFB1_node_1 (SEQ ID NO: 451) | HSTGFB1_T5 (SEQ ID NO: 433), |
| | HSTGFB1_T6 (SEQ ID NO: 434), |
| | HSTGFB1_T8 (SEQ ID NO: 435), |
| | HSTGFB1_T9 (SEQ ID NO: 436), |
| | HSTGFB1_T11 (SEQ ID NO: 437) and |
| | HSTGFB1_T14 (SEQ ID NO: 438) |
| HSTGFB1_node_5 (SEQ ID NO: 452) | HSTGFB1_T5 (SEQ ID NO: 433), |
| | HSTGFB1_T6 (SEQ ID NO: 434), |
| | HSTGFB1_T8 (SEQ ID NO: 435), |
| | HSTGFB1_T9 (SEQ ID NO: 436), |
| | HSTGFB1_T11 (SEQ ID NO: 437) and |
| | HSTGFB1_T14 (SEQ ID NO: 438) |
| HSTGFB1_node_11 (SEQ ID NO: 453) | HSTGFB1_T5 (SEQ ID NO: 433), |
| | HSTGFB1_T6 (SEQ ID NO: 434), |
| | HSTGFB1_T8 (SEQ ID NO: 435), |
| | HSTGFB1_T9 (SEQ ID NO: 436), |
| | HSTGFB1_T11 (SEQ ID NO: 437) and |
| | HSTGFB1_T14 (SEQ ID NO: 438) |
| HSTGFB1_node_14 (SEQ ID NO: 454) | HSTGFB1_T5 (SEQ ID NO: 433), |
| | HSTGFB1_T6 (SEQ ID NO: 434), |
| | HSTGFB1_T8 (SEQ ID NO: 435), |
| | HSTGFB1_T9 (SEQ ID NO: 436), |
| | HSTGFB1_T11 (SEQ ID NO: 437) and |
| | HSTGFB1_T14 (SEQ ID NO: 438) |
| HSTGFB1_node_16 (SEQ ID NO: 455) | HSTGFB1_T5 (SEQ ID NO: 433), |
| | HSTGFB1_T6 (SEQ ID NO: 434), |
| | HSTGFB1_T8 (SEQ ID NO: 435) and |
| | HSTGFB1_T9 (SEQ ID NO: 436) |
| HSTGFB1_node_17 (SEQ ID NO: 456) | HSTGFB1_T5 (SEQ ID NO: 433), |
| | HSTGFB1_T6 (SEQ ID NO: 434), |
| | HSTGFB1_T8 (SEQ ID NO: 435) and |
| | HSTGFB1_T9 (SEQ ID NO: 436) |
| HSTGFB1_node_18 (SEQ ID NO: 457) | HSTGFB1_T5 (SEQ ID NO: 433), |
| | HSTGFB1_T6 (SEQ ID NO: 434), |
| | HSTGFB1_T8 (SEQ ID NO: 435) and |
| | HSTGFB1_T9 (SEQ ID NO: 436) |
| HSTGFB1_node_19 (SEQ ID NO: 458) | HSTGFB1_T5 (SEQ ID NO: 433), |
| | HSTGFB1_T6 (SEQ ID NO: 434), |
| | HSTGFB1_T8 (SEQ ID NO: 435) and |
| | HSTGFB1_T9 (SEQ ID NO: 436) |
| HSTGFB1_node_23 (SEQ ID NO: 459) | HSTGFB1_T6 (SEQ ID NO: 434) and |
| | HSTGFB1_T14 (SEQ ID NO: 438) |
| HSTGFB1_node_25 (SEQ ID NO: 460) | HSTGFB1_T5 (SEQ ID NO: 433), |
| | HSTGFB1_T6 (SEQ ID NO: 434), |
| | HSTGFB1_T11 (SEQ ID NO: 437) and |
| | HSTGFB1_T14 (SEQ ID NO: 438) |
| HSTGFB1_node_27 (SEQ ID NO: 461) | HSTGFB1_T5 (SEQ ID NO: 433), |
| | HSTGFB1_T6 (SEQ ID NO: 434), |
| | HSTGFB1_T11 (SEQ ID NO: 437) and |
| | HSTGFB1_T14 (SEQ ID NO: 438) |
| HSTGFB1_node_30 (SEQ ID NO: 462) | HSTGFB1_T8 (SEQ ID NO: 435) and |
| | HSTGFB1_T9 (SEQ ID NO: 436) |

TABLE 176
Proteins of interest

| Protein Name | Corresponding Transcript(s) |
|---|---|
| HSTGFB1_P2 (SEQ ID NO: 464) | HSTGFB1_T5 (SEQ ID NO: 433) |
| HSTGFB1_P3 (SEQ ID NO: 465) | HSTGFB1_T6 (SEQ ID NO: 434) |
| HSTGFB1_P5 (SEQ ID NO: 466) | HSTGFB1_T8 (SEQ ID NO: 435); |
| | HSTGFB1_T9 (SEQ ID NO: 436) |
| HSTGFB1_P7 (SEQ ID NO: 467) | HSTGFB1_T11 (SEQ ID NO: 437) |
| HSTGFB1_P10 (SEQ ID NO: | HSTGFB1_T14 (SEQ ID NO: 438) |
| 468) | |

[1758] These sequences are variants of the known protein Transforming growth factor beta 1 precursor (SEQ ID NO:463) (SwissProt accession identifier TGFB1_HUMAN (SEQ ID NO:463); known also according to the synonyms TGF-beta 1), referred to herein as the previously known protein.

[1759] Protein Transforming growth factor beta 1 precursor (SEQ ID NO:463) is known or believed to have the following function(s): Multifunctional peptide that controls proliferation, differentiation, and other functions in many cell types. Many cells synthesize TGF-beta 1 and essentially all of them have specific receptors for this peptide. TGF-beta 1 regulates the actions of many other peptide growth factors and determines a positive or negative direction of their effects. Play an important role in bone remodelling. It is a potent stimulator of osteoblastic bone formation, causing chemotaxis, proliferation and differentiation in committed osteoblasts (By similarity). Known polymorphisms for this sequence are as shown in Table 177.

TABLE 177
Amino acid mutations for Known Protein

| SNP | |
|---|---|
| position(s) | |
| on amino | |
| acid | |
| sequence | Comment |
| 10 | L -> P (associated with higher bone mineral density and lower |
| | frequency of vertebral fractures in Japanese post-menopausal |
| | women; dbSNP: 1982073). /FTId = VAR_016171. |
| 25 | R -> P (in dbSNP: 1800471). /FTId = VAR_016172. |
| 81 | Y -> H (in CED; leads to TGF-beta 1 intracellular |
| | accumulation)./FTId = VAR_017607. |
| 218 | R -> C (in CED; higher levels of active TGF-beta 1 in |
| | the culture medium; enhances osteoclast formation in |
| | vitro). /FTId = VAR_017608. |
| 218 | R -> H (in CED). /FTId = VAR_017609. |
| 222 | H -> D (in CED; sporadic case; higher levels of active |
| | TGF-beta 1 in the culture medium). /FTId = VAR_017610. |
| 225 | C -> R (in CED; higher levels of active TGF-beta 1 in |
| | the culture medium). /FTId = VAR_017611. |
| 263 | T -> I (in dbSNP: 1800472). /FTId = VAR_016173. |
| 159 | R -> RR |

[1760] Protein Transforming growth factor beta 1 precursor (SEQ ID NO:463) localization is believed to be Secreted.

[1761] It has been investigated for clinical/therapeutic use in humans, for example as a target for an antibody or small molecule, and/or as a direct therapeutic; available information related to these investigations is as follows. Potential pharmaceutically related or therapeutically related activity or activities of the previously known protein are as follows: Immunosuppressant; Interleukin 2 antagonist; Transforming growth factor beta agonist. A therapeutic role for a protein represented by the cluster has been predicted. The cluster was assigned this field because there was information in the drug database or the public databases (e.g., described herein above) that this protein, or part thereof, is used or can be used for a potential therapeutic indication: Vulnerary; Cytokine; Immunosuppressant.

[1762] The following GO Annotation(s) apply to the previously known protein. The following annotation(s) were found: cell cycle control; anti-apoptosis; TGFbeta receptor signaling pathway; cell-cell signaling; cell proliferation; cell growth; growth, which are annotation(s) related to Biological Process; and transforming growth factor beta receptor ligand, which are annotation(s) related to Molecular Function.

[1763] The GO assignment relies on information from one or more of the SwissProt/TremBl Protein knowledgebase, available from <http://www.expasy.ch/sprot/>; or Locuslink, available from <http://www.ncbi.nlm.nih.gov/projects/LocusLink/>.

[1764] According to optional but preferred embodiments of the present invention, variants of this cluster according to the present invention (amino acid and/or nucleic acid sequences of HSTGFB1) may optionally have one or more of the following utilities, as described with regard to Table 178 below. It should be noted that these utilities are optionally and preferably suitable for human and non-human animals as subjects, except where otherwise noted. The reasoning is described with regard to biological and/or physiological and/or other information about the known protein, but is given to demonstrate particular diagnostic utility for the variants according to the present invention.

TABLE 178
Utilities for Variants of HSTGFB1

| | | |
|---|---|---|
| Late-onset Alzheimer's | significant increase of sCD40 plasma levels, | Exp Gerontol. 2004 |
| disease (AD) | concomitantly with a decrease in TGF-beta1 | Oct; 39(10): 1555-61 |
| | concentrations might represent possible | |
| | differential biomarkers of AD, and be useful pre- | |
| | mortem to support the clinical diagnosis of late- | |
| | onset AD. | |
| coronary perivascular | Markedly increased PAI-1 and TGF-beta were | J Mol Cell Cardiol. |
| fibrosis associated with | seen immunohistochemically in coronary vascular | 2004 Aug; 37(2): 525-35 |
| insulin resistance and | wall and confirmed by western blotting in obese | |
| obesity | mice. Treatment of these mice with temocapril | |
| | prevented increases in perivascular fibrosis, | |
| | plasma PAI-1 and TGF-beta(1), left ventricular | |
| | collagen and mural immunoreactivity for PAI-1, | |
| | TGF-beta and collagen type 1 | |
| ulcerative colitis (UC) | Using specific antibodies it was shown that IL-1ra | Inflamm Res. 2004 |
| | and TGF-beta 1 appear to modulate the degree of | Feb; 53(2): 53-9. Epub |
| | inflammation at different stages of the | 2004 Jan 26. |
| | inflammatory process. The levels of TGF-beta 1, | |
| | and its effect in controlling inflammation, was | |
| | most marked in mild but not severe UC | |
| breast cancer, diagnosis | Patients who carried the C allele of T + 29C | Cancer Res. 2004 Feb |
| and prognosis | polymorphism had a reduced 5-year disease-free | 1; 64(3): 836-9 |
| | survival rate. Genetic polymorphisms in the TGF- | |
| | beta1 gene may play a role in breast cancer | |
| | progression | |
| larynx squamous | Ten of the 21 specimens of the larynx squamous | Lin Chuang Er Bi Yan |
| carcinoma | carcinoma showed positive expression of TGF- | Hou Ke Za Zhi. 2003 |
| | beta 1 mRNA, then the expression ratio was | Sep; 17(9): 532-4 |
| | 47.62%. The expression of TGF-beta 1 mRNA had | |
| | relationship to the pathological grading and the | |
| | clinical staging of the larynx carcinoma. | |
| laryngeal carcinoma | The expression of TGF-beta 1 was decreased in | Lin Chuang Er Bi Yan |
| | carcinoma tissues when compared with peri-cancer | Hou Ke Za Zhi. 2003 |
| | controls. There was no difference in T beta R II | Jun; 17(6): 336-8 |
| | expression when compared with peri cancer | |
| | controls (P > 0.05). But it was correlated with the | |
| | stage, differentiation and lymph node metastasis of | |
| | laryngeal carcinoma | |
| advanced breast cancer | Plasma TGF-beta 1 values were significantly | Eur J Cancer. 2003 |
| | elevated (P < 0.05) in stage IIIB/IV patients | Mar; 39(4): 454-61 |
| | (median value: 2.40 ng/ml, range: 0.13-8.48 ng/ml, | |
| | n = 44) compared with healthy donors (median | |
| | value: 1.30 ng/ml, range: 0.41-4.93 ng/ml, n = 36). | |
| cirrhosis | TGF beta 1 level (11.77 +/− 1.32 ng/ml) and ET-1 | Hua Xi Yi Ke Da Xue |
| | level (78.37 +/− 17.54 pg/ml) were significantly | Xue Bao. 2001 |
| | higher in the patients than those in controls(P < | Jun; 32(2): 202-3, 212 |
| | 0.05) | |
| gastric cancer | It was found that TGF-beta 1 mRNA expression in | Korean J Intern Med. |
| | gastric cancer might concern the early stage of | 2002 Sep; 17(3): 160-6. |
| | gastric carcinogenesis and, it was higher in | |
| | patients with early gastric cancer, negative lymph- | |
| | nodes or negative perineural invasion. | |
| Liver dysfunction | chronic hepatitis B involving liver cell function | Zhonghua Gan Zang |
| | and liver fibrosis | Bing Za Zhi. 2002 |
| | | Jun; 10(3): 221-2. |
| human renal allograft | | Transplant Proc. 2001 |
| recipients | | Nov-Dec; 33(7-8): |
| | | 3148-50 |
| Kidney dysfunction | Diagnosis of chronic allograft nephropathy | Nephrol Dial |
| | | Transplant. 2001; 16 |
| | | Suppl 1: 114-6 |
| diabetic nephropathy | Forty-five days of diabetes resulted in increased | Horm Metab Res. |
| | albuminuria (p < 0.05), urinary TGF-beta 1 (p < | 2001 Nov; 33(11): 664-9 |
| | 0.05) and GLUT1 protein abundance (p < 0.05). | |
| | There was a positive correlation between urinary | |
| | TGF-beta 1 and plasma glucose levels (r = 0.65, p < | |
| | 0.05) and albuminuria (r = 0.72, p < 0.05). | |
| Systolic blood pressure | association between a transforming growth factor | J Appl Physiol. 2001 |
| at rest and in response | (TGF)-beta(1) gene polymorphism in codon 10 | Oct; 91(4): 1808-13. |
| to acute exercise | and blood pressure (BP) at rest, in acute response | |
| | to exercise | |
| prostate cancer- cancer | Plasma TGF-beta(1) levels are markedly elevated | J Clin Oncol. 2001 Jun |
| stage and prognosis in | in men with prostate cancer metastatic to regional | 1; 19(11): 2856-64 |
| patients who undergo | lymph nodes and bone. In men without clinical or | |
| radical prostatectomy | pathologic evidence of metastases, the | |
| | preoperative plasma TGF-beta(1) level is a strong | |
| | predictor of biochemical progression after surgery, | |
| | presumably because of an association with occult | |
| | metastatic disease present at the time of radical | |
| | prostatectomy. | |
| invasive prostate | Elevated plasma levels of TGF-beta 1 in patients | Nat Med. 1995 |
| cancer | with invasive prostate cancer | Apr; 1(4): 282-4. |
| | | J Cell Biochem Suppl. |
| | | 1992; 16H: 54-61 |
| ovarian carcinoma | expression of LTBP-1 and TGF-beta 1 mRNAs | Jpn J Cancer Res. |
| | was much higher in both serous and mucinous | 2001 May; 92(5): 506-15. |
| | adenocarcinomas than in their benign counterparts | Lab Invest. 1995 |
| | | Aug; 73(2): 213-20 |
| vulvar lichen sclerosus | Slight increase in TGF-beta 1 staining was seen in | J Reprod Med. 2001 |
| | the upper and mid-dermis in 6 of the 10 lichen | Feb; 46(2): 117-24. |
| | sclerosus specimens and in the morphea specimens | |
| | as compared to the control tissue, and this staining | |
| | was localized within cells | |
| gastric carcinoma | An elevated level of TGF-beta 1 was significantly | Anticancer Res. 2000 |
| | correlated with lymph node metastasis and poor | Nov-Dec; |
| | prognosis | 20(6B): 4489-93 |
| breast cancer | Of the 153 invasive breast cancer tissues, TGF | Anticancer Res. 2000 |
| | beta 1 was expressed strongly in 25 and | Nov-Dec; |
| | moderately in 98 cases. Immunostaining for | 20(6B): 4413-8 |
| | TGFb3 but not TGF beta 1 was inversely | |
| | correlated with overall survival (p = 0.0204). | |
| | When combined with lymph node involvement, | |
| | TGFb3 became an even more significant | |
| | prognostic factor for overall survival (p = 0.0003), | |
| breast cancer | TGF-beta 1 expression was found in 160/273 | Anticancer Res. 1995 |
| | (59%) and TGF-2 in 110/273 (40%) of tumour | Nov-Dec; |
| | specimens | 15(6B): 2627-31. |
| carcinoma of the cervix | In carcinoma of the cervix, pretreatment TGF beta | Int J Radiat Oncol Biol |
| | 1 levels reflect tumor burden and are a significant | Phys. 2000 Nov |
| | prognostic factor for survival | 1; 48(4): 991-5 |
| hypertension | A higher plasma TGF-beta(1) concentration is | Am J Hypertens. 2003 |
| | found in hypertensive patients with | Jul; 16(7): 604-11 |
| | microalbuminuria and left ventricle hypertrophy. | |
| Pseudoexfoliation | The immunolabeling of both intra- and extraocular | Klin Monatsbl |
| (PEX) syndrome | PEX deposits with antibodies against latent TGF- | Augenheilkd. 2000 |
| | beta 1 binding protein (LTBP-1) was particularly | Jun; 216(6): 412-9 |
| | prominent. In addition to the known intraocular | |
| | sites of PEX material accumulations, focal plaque- | |
| | like LTBP-1 positive deposits could be observed | |
| | in the conjunctival stroma, optic nerve meninges, | |
| | skin, heart muscle, lungs, kidney as well as in the | |
| | adventitia of the aorta and cerebral artery from | |
| | donors with PEX syndrome; such plaque-like | |
| | deposits positive for LTBP-1 were not present in | |
| | the control tissues | |
| pulmonary dysfunction | Patients with cystic fibrosis of a TGF-beta(1) high | Thorax. 2000 |
| in patients with cystic | producer genotype for codon 10 had more rapid | Jun; 55(6): 459-62 |
| fibrosis | deterioration in lung function than those with a | |
| | TGF-beta(1) low producer genotype | |
| multiple sclerosis | Biologically active TGF-beta 1 in serum was | Acta Neurol Scand. |
| | reduced in MS patients compared to controls, on | 1997 Aug; 96(2): 101-5 |
| | the other hand total TGF-beta 1 was elevated in | |
| | CSF compared to patients with OND. Biologically | |
| | active TGF-beta 1 in CSF correlated positively | |
| | with the duration of the acute relapse in patients | |
| | with primary-relapsing MS | |
| periodontal disease | In the patients, a significantly higher concentration | Eur J Oral Sci. 1997 |
| | of TGF-beta 1 was observed both in the gingival | Apr; 105(2): 136-42 |
| | tissues and fluid samples obtained from the sites | |
| | with deeper periodontal pockets than in the less | |
| | involved sites | |
| Multiple myeloma | | Acta Haematol. |
| | | 1997; 98(2): 116-8. |
| pulmonary | The survival rate was worse in patients in whom | Pathol Res Pract. 1996 |
| adenocarcinoma | each of the four growth factors was expressed than | Nov; 192(11): 1113-20 |
| | in those where growth factors were not expressed | |
| basal cell carcinoma | The stroma of most BCCs revealed enhanced | Br J Dermatol. 1996 |
| | TGF-beta 1 and T beta R II mRNA expression | Jun; 134(6): 1044-51 |
| | when compared with normal dermis | |
| progressive renal | Transgenic mice with increased plasma levels of | Lab Invest. 1996 |
| disease (progressive | TGF-beta 1 develop progressive renal disease | Jun; 74(6): 991-1003 |
| glomerulosclerosis) | | |
| progressive kidney | in rats given a second antibody injection, one week | Kidney Int. 1994 |
| fibrosis | later, the glomerular expression of TGF-beta 1 | Mar; 45(3): 916-27 |
| | mRNA and TGF-beta 1 protein remained elevated | |
| | through 18 weeks and was associated with a large | |
| | infiltration of mononuclear cells, with staining | |
| | features of fibroblastic/myofibroblastic cells, | |
| | strongly expressing TGF-beta 1 in the | |
| | tubulointerstitium of the kidney. | |
| renal allograft | Investigation demonstrated a significant | Kidney Int. 1996 |
| interstitial fibrosis and | correlation between intragraft TGF-beta 1 mRNA | May; 49(5): 1297-303 |
| chronic allograft | display and renal allograft interstitial fibrosis and | |
| nephropathy | chronic allograft nephropathy | |
| ischemic stroke/ | The ischemic penumbra contained the highest | Stroke. 1996 |
| ischemic brain tissue | levels of TGF-beta 1 mRNA, whereas the normal | May; 27(5): 852-7 |
| | contralateral hemispheres had the least (P < .001, | |
| | Mann-Whitney U test). | |
| diabetic nephropathy | Higher expression of TGF-beta 1 mRNA was | Kidney Int. 1996 |
| | observed in glomeruli of patients with diabetic | Apr; 49(4): 1120-6 |
| | nephropathy as compared with normal glomeruli. | |
| idiopathic pulmonary | TGF-beta 1 is expressed in epithelial cells of | Am J Respir Cell Mol |
| fibrosis | fibrotic lungs where the presence of TGF-beta 1 is | Biol. 1996 |
| | an indication of the chronicity of the injury. | Feb; 14(2): 131-8 |
| cardiac fibrosis | Very low expression of TGF-beta(1) and collagen | Mol Genet Metab. |
| | type I and III mRNA is seen in the normal rat | 2000 Sep-Oct; 71(1-2): |
| | heart. Both expressions are markedly increased in | 418-35 |
| | the infarcted heart and the levels of TGF-beta(1) | |
| | mRNA precedes increases in mRNA levels for | |
| | extracellular matrix (ECM) proteins, suggesting a | |
| | possible role of TGF-beta(1) in remodeling | |
| | processes in the myocardium. | |
| radiation-induced lung | TGF beta 1 has been implicated in the | Lung Cancer. 1998 |
| injury | development of normal tissue injury after | Feb; 19(2): 109-20. |
| | irradiation in several organs, including the lung. | |
| | Using the treatment of non-small cell lung cancer | |
| | as a model, we also discuss how it may be possible | |
| | to identify patients at risk for this complication | |
| | using measurements of plasma TGF beta | |
| progressive renal | For the reliable assessment of interstitial fibrosis it | Nephrol Dial |
| insufficiency | was found that the best correlating parameters of | Transplant. 2000; 15 |
| | interstitial fibrosis with renal function were: (i) the | Suppl 6: 72-3 |
| | ratio of protein accumulation of TGF-beta-1 and | |
| | its antagonist decorin; | |
| osteoporosis and | It was shown that a T869-->C polymorphism of | Pharmacogenetics. |
| vertebral fracture, and | the transforming growth factor-beta1 gene, which | 2001 Dec; 11(9): 765-71 |
| with the outcome of | results in a Leu-->Pro substitution at amino acid | |
| treatment for | 10, is associated with bone mineral density in | |
| osteoporosis with | Japanese adolescents and postmenopausal women, | |
| active vitamin D. | with genetic susceptibility to both osteoporosis and | |
| | vertebral fracture, and with the outcome of | |
| | treatment for osteoporosis with active vitamin D. | |
| obesity | Interestingly, the level of TGF-β mRNA was | Arterioscler Thromb |
| | significantly higher in the adipose tissue of both | Vasc Biol. 1998 |
| | ob/ob and db/db mice when compared with their | Jan; 18(1): 1-6. |
| | lean counterparts | |
| Crohn's disease (CD) | Both in CD and UC patients, increased expression | Ann Surg. 1999 |
| and ulcerative colitis | of all TGFbeta isoforms studied was detected in | Jan; 229(1): 67-75; |
| (UC) | the intestinal mucosa in the active phase of the | Gastroenterology. |
| | disease only. The correlation between TGFbeta | 1996 Apr; 110(4): 975-84 |
| | mRNA and severity of the inflammatory reaction | |
| | has also been demonstrated. | |
| Crohn's disease | There was a marked overexpression of TGF-beta | Langenbecks Arch |
| | 1, TGF-beta 3 and T beta R-II in 94% of the | Chir Suppl |
| | Crohn's disease tissue samples | Kongressbd. |
| | | 1998; 115: 994-7. |
| cholecystolithiasis | there was an enhanced TGF-beta1 mRNA | Langenbecks Arch |
| | expression (eightfold increase; P < 0.04) in the | Surg. 2005 |
| | cholecystolithiasis tissue samples in comparison | Feb; 390(1): 21-8. Epub |
| | with normal controls | 2004 Nov 20 |
| hepatic fibrosis | The extent of fibrosis correlated significantly with | Scand J Gastroenterol. |
| | the amount of collagen and TGFbeta1 mRNA | 2000 Sep; 35(9): 969-75 |
| | expression in liver tissues. The collagen content | |
| | and expression of TGFbeta1 mRNA were also | |
| | upregulated significantly in liver tissues with a | |
| | fibrosis score of 7 or more | |
| chronic hepatitis | In patient with chronic hepatitis TGF beta 1 | N Engl J Med. 1991 |
| | mRNA expression correlated closely with the | Apr 4; 324(14): 933-40 |
| | expression of procollagen Type I mRNA in the | |
| | liver (r = 0.94) and serum procollagen Type III | |
| | peptide (r = 0.89) | |
| Chronic hepatitis B and | In patients responding to therapy, TGF-beta1 | Scand J |
| C-response to | expression decreased in parallel with histological | Gastroenterol.2000 |
| INFalpha treatment | improvement, while no difference in TGF-beta1 | Dec; 35(12): 1294-300; |
| | expression was seen before and after treatment in | J. Hepatol, 1999; 30: |
| | non-responders | 1-7 |
| | | Cytokine, 1999: |
| | | 11: 1076-1080 |
| Liver function | Liver cirrhosis resulted in a significant increase of | Cytokine. 2000 |
| impairment in liver | plasma concentration of TGF-beta(1)(39.3 +/− 3.8 ng/ml), | Jun; 12(6): 677-81 |
| cirrhosis | which doubled normal values (18.3 +/− 1.6 ng/ml). | |
| | TGF-beta(1)level increased depending on | |
| | the degree of liver insufficiency. These findings | |
| | suggest possible use of plasma TGF- | |
| | beta(1)measurement as an indicator of liver | |
| | function impairment and possible marker of | |
| | hepatic fibrosis progression in cirrhotic patients | |
| food protein-induced | TGF-beta1 expression was generally depressed in | J Allergy Clin |
| enterocolitis syndrome | patients | Immunol. 2002 |
| (FPIES). | | Jan; 109(1): 150-4 |
| Atopic dermatitis (AD) | The odds ratio of children with AD having a low | J Allergy Clin |
| | TGFB1 producer genotype was 4.8 (95% CI, 2.4--9.7) | Immunol. 2001 |
| | compared with the control subjects (P < | Aug; 108(2): 281-4. |
| | .0001). TGFB1 genotype may partly explain the | |
| | strong genetic predisposition to AD. | |
| hemorrhagic colitis | Concentrations of TGF-beta1 were higher in | Am J Kidney Dis. |
| | children with uncomplicated O157: H7 HC than | 2000 Jan; 35(1): 29-34. |
| | among those who developed HUS (934 +/− 680 | |
| | versus 514 +/− 497 pg/mL, respectively; P < 0.04). | |
| renal parenchymal | There is an association between the TGF-beta1 −800 | Kidney Int. 2002 |
| scarring (RPS) | GA, −509 TT and Leu10-->Pro CT genotypes | Jan; 61(1): 61-7 |
| following childhood | and the presence or absence of RPS. The low | |
| urinary tract infection | TGF-beta1 producer status of the −800 GA | |
| (UTI) | genotype may protect against the development of a | |
| | pro-fibrotic pathology. | |
| celiac disease | The celiac mucosa showed weak aad patchy | J Pediatr Gastroenterol |
| | epithelial TGF-beta immunoreactivity. In contrast, | Nutr. 1999 |
| | an intense staining positivity was present in the | Sep; 29(3): 308-13 |
| | lamina propria localized mostly in the | |
| | subepithelial region where T cells, macrophages, | |
| | and CD25+ cells were detected by double staining. | |
| inflammatory bowel | the numbers of TGF-beta1-positive cells, including | Scand J Gastroenterol. |
| disease (IBD) in | T cells, neutrophils, and monocytes/macrophages, | 1999 Jun; 34(6): 591-600 |
| children | in the lamina propria increased during disease | |
| | activity. | |
| Henoch-Schonlein | TGF-beta-secreting T cells were significantly | Clin Exp Immunol. |
| purpura (HSP) | elevated during the acute stage, and decreased at | 2000 Nov; 122(2): 285-90 |
| | the convalescent stage | |
| salivary adenoid cystic | TGF beta 1 and TGF beta RI proteins were | Hunan Yi Ke Da Xue |
| carcinoma (ACC) | expressed in most ductal epithelial cells and myo- | Xue Bao. 2002 Jun |
| | epithelial cells, but they were not expressed in the | 28; 27(3): 229-32 |
| | acinar epithelial cells of any normal glands | |
| | examined. The contents of TGF beta 1 in ACC | |
| | were significantly higher than those in normal | |
| | salivary glands (P < 0.01), | |
| laryngeal squamous | It was found that invasive tumor growth of the | Anticancer Res. 1999 |
| cell carcinomas | larynx is associated with an increase of the TGF- | Sep-Oct; 19(5B): 4265-72 |
| | beta 1 protein and mRNA expression. The | |
| | synthesis of TGF-beta 1 is mainly performed by | |
| | the tumor cells, but also to a lesser extent by the | |
| | stroma cells. | |
| pediatric astrocytomas | Pilocytic, nonpilocytic, and anaplastic | Mol Chem |
| | astrocytomas have significant increased levels of | Neuropathol. 1998 |
| | IL-1 beta, IL-1RI, and TGF-beta 1 mRNAs, | Feb; 33(2): 125-37 |
| rheumatoid arthritis | TGF-beta 1 expression was significantly up- | Clin Immunol |
| | regulated on RA compared to OA and normal ST | Immunopathol. 1995 |
| | lining cells, interstitial macrophages, and | Aug; 76(2): 187-94 |
| | endothelial cells (P < 0.05). | |
| CHF/ | transition from LVH to CHF has been related to a | Rev Port Cardiol. 1999 |
| Transition from LVH | marked increase in microtubular intracytoplasmic | Jun; 18(6): 635-46. |
| to CHF | structure, the reduction of Ca++ ATPase | |
| | concentration of the sarcoplasmic reticulum, and | |
| | the increased myocardial expression of growth | |
| | factor TGF beta 1, which influences interstitial | |
| | fibrosis | |
| thoracic radiotherapy - | The TGF-beta(1) and IL-6 concentrations in the | Int J Radiat Oncol Biol |
| associated severe | BAL fluid recovered from the irradiated areas | Phys. 2004 Mar |
| pneumonitis | were significantly increased by thoracic RT. The | 1; 58(3): 758-67 |
| | increase in TGF-beta(1) levels tended to be greater | |
| | in the group of patients who developed severe | |
| | pneumonitis | |
| diffusely infiltrating | The expression of TGF beta 1 was markedly | Anticancer Res. 2002 |
| colorectal carcinoma | increased in DICC, especially of the schirrous | Nov-Dec; |
| (DICC) | type, compared to CCC | 22(6B): 3545-54 |
| Type 2 diabetes | In patients with type 2 diabetes mellitus both urine | Pol Arch Med Wewn. |
| mellitus AND diabetic | and serum TGF beta 1 concentration were | 2002 Aug; 108(2): 745-52 |
| nephropathy in the | elevated. A positive correlation between urine | |
| course of diabetes | TGF beta 1 level and the progression of renal | |
| mellitus | failure was observed. In conclusion, urine TGF | |
| | beta 1 level may be a good prognostic factor of the | |
| | development of diabetic nephropathy in the course | |
| | of diabetes mellitus | |
| disturbed placentation | Leptin and TGF-beta(1) concentrations were lower | Placenta. 2002 |
| in women destined to | and PAI-2 concentration higher in women destined | May; 23(5): 380-5 |
| develop pre-eclampsia | to develop pre-eclampsia relative to controls | |
| transitional cell | plasma TGF-beta(1) levels are elevated in patients | Cancer. 2001 Dec |
| carcinoma (TCC) of | with muscle-invasive TCC before cystectomy. | 15; 92(12): 2985-92 |
| the urinary bladder | Transforming growth factor-beta(1) levels are | |
| | highest in patients with bladder carcinoma | |
| | metastatic to lymph nodes and are a strong | |
| | independent predictor of disease recurrence and | |
| | disease specific mortality | |
| Sepsis following | Thermal injury induces a significant increase in | Shock. 2001 |
| thermal injury | serum TGF-beta, which may contribute to post- | Nov; 16(5): 380-2. |
| | burn immunosuppression with an increased | |
| | susceptibility to sepsis | |
| liver fibrosis of chronic | The damage of DNA in hepatocytes of CH | Zhonghua Shi Yan He |
| viral hepatitis (CH). | correlated closely with the expression of Fas and | Lin Chuang Bing Du |
| | TGF-beta 1 in liver tissue and serum. In severe | Xue Za Zhi. 2000 |
| | type CH and liver cirrhosis, the degree of liver | Mar; 14(1): 31-3. |
| | fibrosis and the expression of P III P and TGF-beta | |
| | 1 were higher than that in mild type and moderate | |
| | type CH | |
| discriminating patients | The ability of serum HA, LN and TGF-beta(1) to | Zhonghua Gan Zang |
| of chronic hepatitis | differentiate patients with extensive liver fibrosis | Bing Za Zhi. 2001 |
| with “no liver fibrosis”, | from those with no or mild liver fibrosis exceeded | Jun; 9(3): 148-50 |
| “liver fibrosis but no | that of serum PCIII and CIV (the areas under the | |
| cirrhosis” and “liver | curves = 0.849, 0.819, 0.836 vs 0.702, 0.721, | |
| cirrhosis” | P < 0.05. | |
| chronic idiopathic | serum interleukin-1 beta (IL-1 beta), tumor | Am J Hematol. 2000 |
| neutropenia of adults | necrosis factor-alpha (TNF-alpha), interleukin-6 | Dec; 65(4): 271-7 |
| (CINA) | (IL-6), transforming growth factor-beta(1) (TGF- | |
| | beta(1)), and soluble tumor necrosis factor | |
| | receptor p55 (sTNF-RI) were all significantly | |
| | increased in CINA patients compared to controls | |
| primary hepatic | The result revealed that serum TGF beta 1 level of | Zhonghua Nei Ke Za |
| carcinoma (PHC) | PHC patients were significantly higher (257.6 +/− | Zhi. 1997 |
| | 126.0 micrograms/L) than those in normal subjects | Oct; 36(10): 669-72 |
| | (81.5 +/− 43.5 micrograms/L). Above results | |
| | suggest that serum TGF beta 1 might be a | |
| | candidate for a novel tumor marker for diagnosis | |
| | and monitoring of PHC | |
| dengue haemorrhagic | plasma obtained from children with DHF had | Trans R Soc Trop Med |
| fever (DHF) in | significantly higher levels of TGF beta-1 than | Hyg. 1998 Nov-Dec; |
| children with dengue | plasma from children with DF, especially from | 92(6): 654-6 |
| virus infection | days 1 to 3 after the onset of fever | |
| Preterm neonates with | TGF beta 1 levels were lower in patients with | Allergol |
| respiratory distress | CLD and they showed undetectable values in 8 | Immunopathol (Madr). |
| syndrome (RDS) with | samples. | 1999 Jan-Feb; |
| chronic lung disease | | 27(1): 11-7 |
| (CLD). | | |
| tarsal and limbal forms | Increased levels of TGF-beta 1, IL-1 and IL-6 in | Exp Eye Res. 1998 |
| of vernal | VKC tissues and tears indicate a local production | Jul; 67(1): 105-12. |
| keratoconjunctivitis | of these cytokines in active VKC | |
| (VKC) | | |
| bullous pemphigoid | an opposite behavior was observed for | Br J Dermatol. 1998 |
| (BP) | transforming growth factor beta 1 (TGF-beta 1), | Apr; 138(4): 611-4 |
| | whose serum levels were higher in BP than the | |
| | concentrations in BF | |
| ureteropelvic junction | The level of TGFbeta1 is elevated in the renal | Urology. 1997 |
| obstruction (UPJO). | pelvis of children with UPJO compared to the | Nov; 50(5): 769-73. |
| | level in the bladder of either obstructed or | |
| | nonobstructed upper urinary tracts. | |
| hepatocellular | The results indicate that there were significantly | Medicine (Baltimore). |
| carcinoma (HCC) | increased urinary TGF-beta 1 levels in patients | 1997 May; 76(3): 213-26 |
| | with HCC. Raised TGF-beta 1 levels were | |
| | associated, in a dose-related fashion, with | |
| | increased risk for development of HCC (odds | |
| | ratio, 1.05, 95% confidence interval, 1.03-1.07). | |
| | HCC patients with raised TGF-beta 1 levels had | |
| | shorter survival | |
| coronary artery disease | naturally active TGF-beta 1 was significantly | Cardiovasc Res. 1997 |
| (CAD) | higher in CAD patients (1.74 +/− 0.18 vs 0.96 +/− | May; 34(2): 404-10. |
| | 0.17 ng/ml, P < 0.01). An increase in active TGF- | |
| | beta 1 levels was identified with both the | |
| | occurrence and severity of CAD which is | |
| | independent of standard CAD risk factors | |
| Lung cancer | Elevated TGF beta 1 were found in 50% (27/54) of | Lung Cancer. 1996 |
| | lung cancer patients. During radiation therapy | Dec; 16(1): 47-59 |
| | plasma TGF beta 1 levels declined, however, by | |
| | the completion of treatment the mean TGF beta 1 | |
| | level had not normalized in patients with lung | |
| | cancer. The TGF beta 1 level at last follow-up | |
| | correlated with disease status in those patients with | |
| | an increased pretreatment plasma level. | |
| Non-Insulin Dependent | TGF-beta 1 was significantly elevated in NIDDM | Diabetes Care. 1996 |
| Diabetes Mellitus | (7.9 +/− 1.0 ng/ml), as compared with control | Oct; 19(10): 1113-7 |
| | subjects (3.1 +/− 0.4 ng/ml, P < 0.001) | |
| colorectal tumours | In 86% of the tumors the LAP-TGF-beta complex | Br J Cancer. 1996 |
| | was present in both the stromal and epithelial cells, | Sep; 74(5): 753-8 |
| | whereas the mature TGF-beta 1 peptide was | |
| | expressed in the glandular epithelium of 58.3% of | |
| | these tumours. Intense staining for TGF-beta 1 was | |
| | positively associated with advanced Dukes' stage. | |
| | Furthermore, there was a significant correlation | |
| | between the presence of TGF-beta 1 in the | |
| | tumours and a shorter post-operative survival. | |
| anti-neutrophil | the TGF-beta 1 isoform was found to be over- | Clin Exp Immunol. |
| cytoplasmic antibody | expressed in SV (systemic vasculitides), including | 1996 Jul; 105(1): 104-11 |
| (ANCA)-associated | AAV, and to correlate with disease activity as | |
| vasculitis (AAV) | shown for WG (Wegener granulomatosis). Mean | |
| | TGF-beta 1 plasma levels in AAV patients ranged | |
| | from 8.9 ng/ml (WG) to 13.3 ng/ml (CSS) (control | |
| | 4.2 ng/ml; P < 0.01) | |
| cervical carcinoma of | Percent positive staining for the intracellular form | Cancer. 1996 Mar |
| the uterine | of TGF-beta 1 was 100% for normal epithelium, | 15; 77(6): 1107-14 |
| | 73.3% for CIN, and 44.1% for invasive | |
| | carcinomas, (P = 0.002). Percent positive staining | |
| | for the extracellular form of TGF-beta 1 was | |
| | 63.6% for stroma underlying normal epithelium, | |
| | 60% for stroma associated with CIN, and 94.1% | |
| | for stroma surrounding invasive cancer (P = 0.007) | |
| Pancreatic cancer | TGF-beta 1 inhibits the generation of the | Surgery. 1998 |
| | antiangiogenic molecule angiostatin by human | Aug; 124(2): 388-93 |
| | pancreatic cancer cells in a time- and dose- | |
| | dependent manner | |
| Autoimmune diseases | Increased TGF-betal production correlates with | J Autoimmun. 2000 |
| | protection and/or recovery from autoimmune | Feb; 14(1): 23-42 |
| | diseases. TGF-betal levels are expected to be | |
| | related to the extent of autoimmune process | |

[1765] According to other optional embodiments of the present invention, variants of this cluster according to the present invention (amino acid and/or nucleic acid sequences of HSTGFB1) may optionally have one or more of the following utilities, some of which are related to utilities described above. It should be noted that these utilities are optionally and preferably suitable for human and nonhuman animals as subjects, except where otherwise noted.

[1766] A non-limiting example of such a utility is monitoring effectiveness of topically applied androgens in Sjogren's syndrome by detecting a HSTGFB1 variant according to the present invention, optionally and preferably in tears when such androgens are topically applied to the eye. The level of such a variant according to the present invention may optionally be correlated with the effectiveness of such treatment for symptomatic relief of ocular dryness (keratoconjunctivitis sicca (KCS)), a typical complication of Sjogren's syndrome.

[1767] Use of the known protein for such a diagnostic utility is described with regard to EP0831868, hereby incorporated by reference as if fully set forth herein.

[1768] Another non-limiting example of such a utility is the detection of an increased susceptibility to osteoporosis by detecting a HSTGFB1 variant according to the present invention. The known protein, TGF-β1, is released from bone matrix during bone resorption and subsequently activated by the low pH below the ruffled border of the resorbing osteoclasts. TGF-β1 has been implicated as a possible mediator of coupling between bone resorption and formation because: it inhibits mature osteoclasts and proliferation of mononuclear osteoclast precursors in vitro; the peptide inhibits fusion of mononuclear precursors into osteoclasts; TGF-β1 has been found to stimulate proliferation or differentiation of preosteoblasts in vitro; and bone matrix has the highest concentrations of TGF-β1 of all tissues. A particular variation in the human TGF-β1 gene, the 713-8delC sequence variation, has been shown to be correlated with an altered osteoporosis risk, as described with regard to EP0955378, hereby incorporated by reference as if fully set forth herein.

[1769] Another non-limiting example of such a utility is the diagnosis of diseases including, but not limited to, a variety of cancers, including but not limited to breast cancer, colorectal cancer and classical Hodgkin's Lymphoma (cHL), fibrosis, suppression of cell-mediated immunity, glaucoma and diffuse systemic sclerosis.

[1770] Use of the known protein for such a diagnostic utility is described with regard to WO 04/113522, hereby incorporated by reference as if fully set forth herein.

[1771] Another non-limiting example of such a utility is the diagnosis of susceptibility to renal disease, optionally and preferably including prognosis of progression of renal disease and/or progression to renal failure, optionally including chronic renal failure (CRF) and/or ESRF. Optionally, the diagnosis may include determination of the prognosis of renal disease and/or renal failure from a variety of diseases and/or conditions, including but not limited to, hypertension (optionally including but not limited to systemic hypertension and/or essential hypertension), diabetes mellitus, vascular diseases, systemic lupus erythematosus, obstruction to the urinary tract or inflammation of the tubular system (pyelonephritis) and/or increased age. CRF is defined as an irreversible, long-standing loss of renal function. End stage renal failure (ESRF) is an advanced form of CRF and refers to advanced renal insufficiency when renal function is approximately 10% of normal prior to the initiation of either dialysis or renal transplantation. The incidence of renal failure from various renal diseases increases with age; vascular diseases and diabetes mellitus are the most common causes of ESRD in the elderly. CRF can also arise as a complication of systemic lupus erythematosus, obstruction to the urinary tract or inflammation of the tubular system (pyelonephritis). Systemic hypertension has been shown to be one of the major factors contributing to the deterioration of renal function and elevated blood pressure can be a cause or a consequence of renal injury. The incidence of systemic hypertension in patients with serious renal disease is 90%. Furthermore the incidence of renal failure in patients with non-accelerated essential (no apparent cause) hypertension is about 10%. Polymorphisms in the human TGF-β1 gene have been shown to correlate with increased risk of renal failure, as described in WO 02/090585, hereby incorporated by reference as if fully set forth herein.

[1772] HNRPUL1 (NM_{—}007040; NP_{—}008971) is antisense, tail to tail, to TGF-β1 and may therefore be co-regulated with one or more HSTGFB1 variants according to the present invention, and hence may have one or more utilities of HSTGFB1 variants according to the present invention as described herein. HNRPUL1 is E1B-55 kDa-associated protein (E1B-AP5). The adenovirus type 5 (Ad5) early 1B 55-kDa protein (E1B-55 kDa) is a multifunctional phosphoprotein that regulates viral DNA replication and nucleocytoplasmic RNA transport in lytically infected cells. In addition, E1B-55 kDa provides functions required for complete oncogenic transformation of rodent cells in cooperation with the E1A proteins. HNRPUL1 is a nuclear RNA-binding protein of the heterogeneous nuclear ribonucleoprotein (hnRNP) family. Two distinct segments in the 55-kDa polypeptide which partly overlap regions responsible for p53 binding are required for complex formation with E1B-AP5 in Ad-infected cells. Stable expression of E1B-AP5 in Ad-infected cells overcomes the E1B-dependent inhibition of cytoplasmic host mRNA accumulation. The data suggest that E1B-AP5 might play a role in RNA transport and that this function is modulated by E1B-55 kDa in Ad-infected cells. (Gabler S et al. J Virol. 1998 October; 72(10):7960-71). Thus, HSTGFB1 expression might serve as a marker for oncogenic transformation and adenovirus infection.

Table 179 below describes diagnostic utilities for the cluster HSTGFB1 that were found through microarrays, including the statistical significance thereof and a reference. One or more HSTGFB1 variants according to the present invention may optionally have one or more of these utilities.

TABLE 179

| | Statistical | |
|---|---|---|
| Diagnostic utility | significance | reference |
| Gene over expressed in | 6.2E−8 to | Su AI, Hampton GM Cancer Res (2001) Molecular |
| Clear Cell Renal Cell | 8.8E−4 | Classification of Human Carcinomas by Use of Gene |
| Carcinoma (vs. normal | | Expression Signatures. |
| kidney and other cancer | | Higgins JP, Brooks JD. Am J Pathol (2003) Gene |
| types). | | expression patterns in renal cell carcinoma assessed |
| | | by complementary DNA microarray. |
| Gene over expressed in | 8.4E−10 | Armstrong SA, Korsmeyer SJ Nat Genet (2002) |
| Mixed Lineage Leukemia | | MLL translocations specify a distinct gene |
| (vs. Acute Lymphocyctic | | expression profile that distinguishes a unique |
| Leukemia, Acute | | leukemia. |
| Myelogenous Leukemia) | | |
| Gene over expressed in lung | 3E−4 to 0.04, | Beer DJ, Hanash SM Nature Medicine (2002) Gene- |
| Adenocarcinoma and | 1.1E−4, 3.5E−5 | expression profiles predict survival of patients with |
| carcinoid and under | to 0.026 | lung adenocarcinoma. |
| expressed in Squamous Cell | respectively. | Garber ME, Petersen I PNAS (2001) Diversity of |
| Lung Carcinoma. | | gene expression in adenocarcinoma of the lung. |
| Differential diagnosis of lung | | |
| cancer subtypes. | | |
| Gene over expressed in | 5.6E−4, 4.8E−9 | Dhanasekaran SM, Chinnaiyan AM Nature (2001) |
| Benign Prostatic Hyperplasia | | Delineation of prognostic biomarkers in prostate |
| (vs. normal prostate) and | | cancer. |
| under expressed in prostate | | |
| cancer (vs. BPH and normal | | |
| cancer). Differential | | |
| diagnosis of prostate BPH vs. | | |
| prostate cancer. | | |
| Gene under expressed in | | GNF database |
| CD3+ cells of Idiopathic | | (http://www.ncbi.nlm.nih.gov/projects/geo/): |
| thrombocytopenic purpura | | GDS390, probe ID: 41445_at |
| patients, normal expression | | |
| in relapse. Differential | | |
| diagnosis of primary ITP vs. | | |
| relapse. | | |

[1773] Also, microarrays have shown that one or more HSTGFB1 variants according to the present invention may be overexpressed in lung cancer, preferably non small cell lung cancer, optionally adenocarcinoma or squamous cell cancer, preferably carcinoid.

[1774] A-to-I RNA editing is the site-specific modification of adenosine to inosine in stem-loop structures within precursor messenger RNAs. It is essential for normal development, and associated with a number of human diseases. Editing was considered a rare phenomenon, affecting only a handful of targets. However, it has recently been reported that editing of human transcripts is abundant, affecting thousands of genes, and up to 1 in every 2000 nt. The complete functional implications of this phenomenon are still being clarified, but the editing level can serve as a diagnostic marker for neurological diseases and cancers.

[1775] Most human editing sites reside within the primate-specific Alu repeats, and therefore all the exon with Alu repeats have the potential to be edited. The present inventors found such repeats within the exons of TGFB1. Therefore, this sequence should be edited.

[1776] Since altered editing patterns have been found to be associated with inflammation

[1777] Patterson, J. B. et al., 1995 Mol. Cell. Biol., 15, 5376-5388), epilepsy (Brusa, R., et al., 1995 Science, 270, 1677-1680), depression (Gurevich, I., et al., 2002 Neuron, 34, 349-356), ALS, (Kawahara, Y., et al., 2004 Nature, 427, 801) and malignant gliomas (Maas, S., et al., Proc. Natl. Acad. Sci. USA, 98, 14687-14692), the levels of the editing in TGFB1 mRNA may serve as potential diagnostic marker.

[1778] Other non-limiting exemplary utilities for HSTGFB1 variants according to the present invention are described in greater detail below and also with regard to the previous section on clinical utility.

[1779] Cluster HSTGFB1 can be used as a diagnostic marker according to overexpression of transcripts of this cluster in cancer. Expression of such transcripts in normal tissues is also given according to the previously described methods. The term “number” in the left hand column of the table and the numbers on the y-axis of the figure below refer to weighted expression of ESTs in each category, as “parts per million” (ratio of the expression of ESTs for a particular cluster to the expression of all ESTs in that category, according to parts per million).

[1780] Overall, the following results were obtained as shown with regard to the histograms in FIG. 72 and Table 180. This cluster is overexpressed (at least at a minimum level) in the following pathological conditions: epithelial malignant tumors, kidney malignant tumors, pancreas carcinoma and skin malignancies. P values and ratios for expression in cancerous tissue are described in table 181.

TABLE 180
Normal tissue distribution

| Name of Tissue | Number |
|---|---|
| adrenal | 40 |
| bladder | 41 |
| bone | 136 |
| brain | 18 |
| colon | 6 |
| epithelial | 25 |
| general | 51 |
| head and neck | 101 |
| kidney | 6 |
| liver | 0 |
| lung | 21 |
| lymph nodes | 43 |
| breast | 26 |
| muscle | 0 |
| pancreas | 4 |
| prostate | 48 |
| skin | 0 |
| stomach | 36 |
| uterus | 113 |

TABLE 181
P values and ratios for expression in cancerous tissue

| Name of Tissue | P1 | P2 | SP1 | R3 | SP2 | R4 |
|---|---|---|---|---|---|---|
| adrenal | 1.5e−01 | 2.1e−01 | 7.5e−02 | 2.9 | 1.5e−01 | 2.2 |
| bladder | 3.3e−01 | 4.5e−01 | 1.8e−01 | 2.4 | 3.8e−01 | 1.7 |
| bone | 6.8e−01 | 7.3e−01 | 1 | 0.2 | 9.0e−01 | 0.6 |
| brain | 1.8e−01 | 1.1e−01 | 3.1e−01 | 1.6 | 7.1e−03 | 2.1 |
| colon | 7.1e−01 | 5.3e−01 | 1 | 1.0 | 7.7e−01 | 1.2 |
| epithelial | 5.1e−02 | 5.1e−03 | 5.6e−05 | 2.2 | 5.8e−09 | 3.1 |
| general | 2.3e−01 | 3.6e−02 | 5.4e−02 | 1.1 | 3.1e−05 | 1.5 |
| head and neck | 4.6e−01 | 4.3e−01 | 1 | 0.6 | 5.0e−02 | 0.8 |
| kidney | 4.3e−01 | 4.6e−01 | 5.1e−04 | 3.0 | 1.1e−03 | 3.8 |
| liver | 1 | 1.9e−01 | 1 | 1.0 | 8.5e−03 | 2.8 |
| lung | 4.5e−01 | 3.0e−01 | 1.9e−01 | 2.5 | 1.4e−01 | 2.2 |
| lymph nodes | 6.9e−01 | 7.5e−01 | 3.2e−01 | 1.8 | 2.7e−01 | 1.3 |
| breast | 6.5e−01 | 4.0e−01 | 1.5e−01 | 1.8 | 1.4e−01 | 1.7 |
| muscle | 2.9e−01 | 9.5e−02 | 1 | 1.0 | 3.9e−01 | 2.6 |
| pancreas | 3.5e−02 | 4.8e−03 | 5.7e−03 | 6.6 | 1.3e−04 | 7.8 |
| prostate | 8.6e−01 | 8.6e−01 | 8.0e−01 | 0.7 | 6.8e−01 | 0.8 |
| skin | 2.3e−01 | 2.3e−02 | 2.0e−02 | 13.1 | 3.2e−03 | 6.0 |
| stomach | 5.0e−01 | 7.5e−01 | 1.1e−01 | 1.5 | 4.3e−01 | 1.1 |
| uterus | 7.9e−01 | 8.0e−01 | 1 | 0.3 | 9.9e−01 | 0.3 |

[1781] As noted above, cluster HSTGFB1 features 6 transcript(s), which were listed in Table 174 above. These transcript(s) encode for protein(s) which are variant(s) of protein Transforming growth factor beta 1 precursor (SEQ ID NO:463). A description of each variant protein according to the present invention is now provided.

[1782] Variant protein HSTGFB1_P2 (SEQ ID NO:464) according to the present invention has an amino acid sequence; it is encoded by transcript(s) HSTGFB1_T5 (SEQ ID NO:433). An alignment is given to the known protein (Transforming growth factor beta 1 precursor (SEQ ID NO:463)) at. One or more alignments to one or more previously published protein sequences are given in the alignment table located on the attached CDROM. A brief description of the relationship of the variant protein according to the present invention to each such aligned protein is as follows:

[1783] Comparison report between HSTGFB1_P2 (SEQ ID NO:464) and TGFB1_HUMAN (SEQ ID NO:463):

[1784] 1. An isolated chimeric polypeptide encoding for HSTGFB1_P2 (SEQ ID NO:464), comprising a first amino acid sequence being at least 90% homologous to MPPSGLRLLLLLLPLLWLLVLTPGRPAAGLSTCKTIDMELVKRKRIEAIRGQILSKLRLASPPSQGEV PPGPLPEAVLALYNSTRDRVAGESAEPEPEPEADYYAKEVTRVLMVETHNEIYDKFKQSTHSIYMF FNTSELREAVPEPVLLSRAELRLLRLKLKVEQHVELYQKYSNNSWRYLSNRLLAPSDSPEWLSFDV TGVVRQWLSRGGEIEGFRLSAHCSCDSRDNTLQVDING corresponding to amino acids 1-238 of TGFB1_HUMAN (SEQ ID NO:463), which also corresponds to amino acids 1-238 of HSTGFB1_P2 (SEQ ID NO:464), and a second amino acid sequence being at least 70%, optionally at least 80%, preferably at least 85%, more preferably at least 90% and most preferably at least 95% homologous to a polypeptide having the sequence EACFPGHAQL (SEQ ID NO: 661) corresponding to amino acids 239-248 of HSTGFB1_P2 (SEQ ID NO:464), wherein said first amino acid sequence and second amino acid sequence are contiguous and in a sequential order.

[1785] 2. An isolated polypeptide encoding for a tail of HSTGFB1_P2 (SEQ ID NO:464), comprising a polypeptide being at least 70%, optionally at least about 80%, preferably at least about 85%, more preferably at least about 90% and most preferably at least about 95% homologous to the sequence EACFPGHAQL (SEQ ID NO: 661) in HSTGFB1_P2 (SEQ ID NO:464).

[1786] The location of the variant protein was determined according to results from a number of different software programs and analyses, including analyses from SignalP and other specialized programs. The variant protein is believed to be located as follows with regard to the cell: secreted.

[1787] The glycosylation sites of variant protein HSTGFB1_P2 (SEQ ID NO:464), as compared to the known protein Transforming growth factor beta 1 precursor (SEQ ID NO:463), are described in Table 182 (given according to their position(s) on the amino acid sequence in the first column; the second column indicates whether the glycosylation site is present in the variant protein; and the last column indicates whether the position is different on the variant protein).

TABLE 182
Glycosylation site(s)

| Position(s) on known | Present in | Position in |
|---|---|---|
| amino acid sequence | variant protein? | variant protein? |
| 136 | yes | 136 |
| 82 | yes | 82 |
| 176 | yes | 176 |

[1788] The variant protein has the following domains, as determined by using InterPro. The domains are described in Table 183:

TABLE183
InterPro domain(s)

| InterPro ID | Domain description | Analysis type | Position(s) on protein |
|---|---|---|---|
| IPR003911 | Transforming growth factor | FPrintScan | 163-177, 17-36, 178-193, |
| | beta TGFb | | 195-209, 72-84 |
| IPR003939 | Transforming growth factor, | FPrintScan | 12-31, 135-154, 166-177, |
| | beta 1 | | 207-219, 34-43 |
| IPR001111 | Transforming growth factor | HMMPfam | 33-238 |
| | beta (TGFb), N-terminal | | |

[1789] Variant protein HSTGFB1_P2 (SEQ ID NO:464) is encoded by the following transcript(s): HSTGFB1_T5 (SEQ ID NO:433). The coding portion of transcript HSTGFB1_T5 (SEQ ID NO:433) starts at position 1038 and ends at position 1781. The transcript also has the following SNPs as listed in Table 184 (given according to their position on the nucleotide sequence, with the alternative nucleic acid listed; the last column indicates whether the SNP is known or not; the presence of known SNPs in variant protein HSTGFB1_P2 (SEQ ID NO:464) sequence provides support for the deduced sequence of this variant protein according to the present invention).

TABLE 184
Nucleic acid SNPs

| SNP position on nucleotide | Alternative | Previously |
|---|---|---|
| sequence | nucleic acid | known SNP? |
| 181 | C -> A | Yes |
| 205 | C -> T | Yes |
| 206 | T -> A | Yes |
| 211 | G -> C | Yes |
| 214 | G -> | No |
| 289 | C -> | No |
| 390 | G -> C | Yes |
| 585 | G -> A | Yes |
| 651 | C -> T | Yes |
| 762 | C -> A | Yes |
| 789 | C -> A | Yes |
| 896 | C -> T | Yes |
| 1024 | G -> A | Yes |
| 1030 | C -> | No |
| 1030 | C -> T | No |
| 1066 | T -> C | Yes |
| 1111 | G -> C | Yes |
| 1177 | A -> G | Yes |
| 1232 | G -> | No |
| 1443 | A -> C | No |
| 1725 | A -> | No |
| 1725 | A -> T | No |
| 1964 | C -> T | Yes |
| 2139 | C -> T | Yes |
| 2148 | G -> A | Yes |
| 2149 | C -> | No |
| 2254 | G -> | No |
| 2254 | G -> C | No |
| 2255 | C -> | No |
| 2255 | C -> G | No |
| 2286 | G -> | No |
| 2317 | A -> | No |
| 2317 | A -> C | No |
| 2353 | C -> T | No |
| 2408 | C -> T | No |

[1790] Variant protein HSTGFB1_P3 (SEQ ID NO:465) according to the present invention has an amino acid sequence; it is encoded by transcript(s) HSTGFB1_T6 (SEQ ID NO:434). An alignment is given to the known protein (Transforming growth factor beta 1 precursor (SEQ ID NO:463)). One or more alignments to one or more previously published protein sequences are given in the alignment table located on the attached CDROM. A brief description of the relationship of the variant protein according to the present invention to each such aligned protein is as follows:

[1791] Comparison report between HSTGFB1_P3 (SEQ ID NO:465) and TGFB1_HUMAN (SEQ ID NO:463):

[1792] 1. An isolated chimeric polypeptide encoding for HSTGFB1_P3 (SEQ ID NO:465), comprising a first amino acid sequence being at least 90% homologous to MPPSGLRLLLLLLPLLWLLVLTPGRPAAGLSTCKTIDMELVKRKRIEAIRGQILSKLRLASPPSQGEV PPGPLPEAVLALYNSTRDRVAGESAEPEPEPEADYYAKEVTRVLMVETHNEIYDKFKQSTHSIYMF FNTSELREAVPEPVLLSRAELRLLRLKLKVEQHVELYQKYSNNSWRYLSNRLLAPSDSPEWLSFDV TGVVRQWLSRGGEIEGFRLSAHCSCDSRDNTLQVDINGFTTGRRGDLATIHGMNRPFLLLMATPLE RAQHLQSSRHRRALDTNYCFSSTEKNCCVRQLYIDFRKDLGWKWIHEPKGYHANFCLGPCPYIWS LDTQYSKV corresponding to amino acids 1-339 of TGFB1_HUMAN (SEQ ID NO:463), which also corresponds to amino acids 1-339 of HSTGFB1_P3 (SEQ ID NO:465), and a second amino acid sequence being at least 70%, optionally at least 80%, preferably at least 85%, more preferably at least 90% and most preferably at least 95% homologous to a polypeptide having the sequence RLAHRATRCAWGEPGRRKRREKEK (SEQ ID NO: 662) corresponding to amino acids 340-363 of HSTGFB1_P3 (SEQ ID NO:465), wherein said first amino acid sequence and second amino acid sequence are contiguous and in a sequential order.

[1793] 2. An isolated polypeptide encoding for a tail of HSTGFB1_P3 (SEQ ID NO:465), comprising a polypeptide being at least 70%, optionally at least about 80%, preferably at least about 85%, more preferably at least about 90% and most preferably at least about 95% homologous to the sequence RLAHRATRCAWGEPGRRKRREKEK (SEQ ID NO: 662) in HSTGFB1_P3 (SEQ ID NO:465).

[1794] The location of the variant protein was determined according to results from a number of different software programs and analyses, including analyses from SignalP and other specialized programs. The variant protein is believed to be located as follows with regard to the cell: secreted.

[1795] The glycosylation sites of variant protein HSTGFB1_P3 (SEQ ID NO:465), as compared to the known protein Transforming growth factor beta 1 precursor (SEQ ID NO:463), are described in Table 185 (given according to their position(s) on the amino acid sequence in the first column; the second column indicates whether the glycosylation site is present in the variant protein; and the last column indicates whether the position is different on the variant protein).

TABLE 185
Glycosylation site(s)

| Position(s) on known | Present in | |
|---|---|---|
| amino acid sequence | variant protein? | Position in variant protein? |
| 136 | yes | 136 |
| 82 | yes | 82 |
| 176 | yes | 176 |

[1796] The variant protein has the following domains, as determined by using InterPro. The domains are described in Table 186:

TABLE 186
InterPro domain(s)

| InterPro ID | Domain description | Analysis type | Position(s) on protein |
|---|---|---|---|
| IPR003911 | Transforming growth factor | FPrintScan | 163-177, 17-36, 178-193, |
| | beta TGFb | | 195-209, 72-84 |
| IPR003939 | Transforming growth factor, | FPrintScan | 12-31, 135-154, 166-177, |
| | beta 1 | | 207-219, 264-275, 34-43 |
| IPR001839 | Transforming growth factor | HMMPfam | 290-341 |
| | beta | | |
| IPR001111 | Transforming growth factor | HMMPfam | 33-252 |
| | beta (TGFb), N-terminal | | |
| IPR001839 | Transforming growth factor | HMMSmart | 293-351 |
| | beta | | |
| IPR001839 | Transforming growth factor | ScanRegExp | 311-326 |
| | beta | | |
| IPR001839 | Transforming growth factor | BlastProDom | 279-339 |
| | beta | | |
| IPR001839 | Transforming growth factor | ProfileScan | 289-328 |
| | beta | | |

[1797] Variant protein HSTGFB1_P3 (SEQ ID NO:465) is encoded by the following transcript(s): HSTGFB1_T6 (SEQ ID NO:434). The coding portion of transcript HSTGFB1_T6 (SEQ ID NO:434) starts at position 1038 and ends at position 2126. The transcript also has the following SNPs as listed in Table 187 (given according to their position on the nucleotide sequence, with the alternative nucleic acid listed; the last column indicates whether the SNP is known or not; the presence of known SNPs in variant protein HSTGFB1_P3 (SEQ ID NO:465) sequence provides support for the deduced sequence of this variant protein according to the present invention).

TABLE 187
Nucleic acid SNPs

| SNP position on | Alternative | Previously |
|---|---|---|
| nucleotide sequence | nucleic acid | known SNP? |
| 181 | C -> A | Yes |
| 205 | C -> T | Yes |
| 206 | T -> A | Yes |
| 211 | G -> C | Yes |
| 214 | G -> | No |
| 289 | C -> | No |
| 390 | G -> C | Yes |
| 585 | G -> A | Yes |
| 651 | C -> T | Yes |
| 762 | C -> A | Yes |
| 789 | C -> A | Yes |
| 896 | C -> T | Yes |
| 1024 | G -> A | Yes |
| 1030 | C -> | No |
| 1030 | C -> T | No |
| 1066 | T -> C | Yes |
| 1111 | G -> C | Yes |
| 1177 | A -> G | Yes |
| 1232 | G -> | No |
| 1443 | A -> C | No |
| 1725 | A -> | No |
| 1725 | A -> T | No |
| 1825 | C -> T | Yes |
| 2000 | C -> T | Yes |
| 2009 | G -> A | Yes |
| 2010 | C -> | No |
| 2203 | G -> | No |
| 2203 | G -> C | No |
| 2204 | C -> | No |
| 2204 | C -> G | No |
| 2235 | G -> | No |
| 2266 | A -> | No |
| 2266 | A -> C | No |
| 2302 | C -> T | No |
| 2357 | C -> T | No |

[1798] Variant protein HSTGFB1_P5 (SEQ ID NO:466) according to the present invention has an amino acid sequence; it is encoded by transcript(s) HSTGFB1_T8 (SEQ ID NO:435) and HSTGFB1_T9 (SEQ ID NO:436). An alignment is given to the known protein (Transforming growth factor beta 1 precursor (SEQ ID NO:463)). One or more alignments to one or more previously published protein sequences are given in the alignment table located on the attached CDROM. A brief description of the relationship of the variant protein according to the present invention to each such aligned protein is as follows:

[1799] Comparison report between HSTGFB1_P5 (SEQ ID NO:466) and TGFB1_HUMAN (SEQ ID NO:463):

[1800] 1. An isolated chimeric polypeptide encoding for HSTGFB1_P5 (SEQ ID NO:466), comprising a first amino acid sequence being at least 90% homologous to MPPSGLRLLLLLLPLLWLLVLTPGRPAAGLSTCKTIDMELVKRKRIEAIRGQILSKLRLASPPSQGEV PPGPLPEAVLALYNSTRDRVAGESAEPEPEPEADYYAKEVTRVLMVETHNEIYDKFKQSTHSIYMF FNTSELREAVPEPVLLSRAELRLLRLKLKVEQHVELYQKYSNNSWRYLSNRLLAPSDSPEWLSFDV TGVVRQWLSRGGEIEGFRLSAHCSCDSRDNTLQVDINGFTTGRRGDLATIHGMNRPFLLLMATPLE RAQHLQSSRHRRALDTNYCFSSTEKNCCVRQLYIDFRKDLGWKWIHEPKGYHANFCLGPCPYIWS LDTQYSK corresponding to amino acids 1-338 of TGFB1_HUMAN (SEQ ID NO:463), which also corresponds to amino acids 1-338 of HSTGFB1_P5 (SEQ ID NO:466), and a second amino acid sequence being at least 70%, optionally at least 80%, preferably at least 85%, more preferably at least 90% and most preferably at least 95% homologous to a polypeptide having the sequence LNEQNLIQEVPNIWQREVG (SEQ ID NO: 663) corresponding to amino acids 339-357 of HSTGFB1_P5 (SEQ ID NO:466), wherein said first amino acid sequence and second amino acid sequence are contiguous and in a sequential order.

[1801] 2. An isolated polypeptide encoding for a tail of HSTGFB1_P5 (SEQ ID NO:466), comprising a polypeptide being at least 70%, optionally at least about 80%, preferably at least about 85%, more preferably at least about 90% and most preferably at least about 95% homologous to the sequence LNEQNLIQEVPNIWQREVG (SEQ ID NO: 663) in HSTGFB1_P5 (SEQ ID NO:466).

[1802] The location of the variant protein was determined according to results from a number of different software programs and analyses, including analyses from SignalP and other specialized programs. The variant protein is believed to be located as follows with regard to the cell: secreted.

[1803] The glycosylation sites of variant protein HSTGFB1_P5 (SEQ ID NO:466), as compared to the known protein Transforming growth factor beta 1 precursor (SEQ ID NO:463), are described in Table 188 (given according to their position(s) on the amino acid sequence in the first column; the second column indicates whether the glycosylation site is present in the variant protein; and the last column indicates whether the position is different on the variant protein).

TABLE 188
Glycosylation site(s)

| Position(s) on known | Present in | Position in |
|---|---|---|
| amino acid sequence | variant protein? | variant protein? |
| 136 | Yes | 136 |
| 82 | Yes | 82 |
| 176 | Yes | 176 |

[1804] The variant protein has the following domains, as determined by using InterPro. The domains are described in Table 189:

TABLE 189
InterPro domain(s)

| InterPro ID | Domain description | Analysis type | Position(s) on protein |
|---|---|---|---|
| IPR003911 | Transforming growth factor | FPrintScan | 163-177, 17-36, 178-193, 195-209, |
| | beta TGFb | | 72-84 |
| IPR003939 | Transforming growth factor, | FPrintScan | 12-31, 135-154, 166-177, 207-219, |
| | beta 1 | | 264-275, 34-43 |
| IPR001839 | Transforming growth factor | HMMPfam | 290-338 |
| | beta | | |
| IPR001111 | Transforming growth factor | HMMPfam | 33-252 |
| | beta (TGFb), N-terminal | | |
| IPR001839 | Transforming growth factor | HMMSmart | 293-357 |
| | beta | | |
| IPR001839 | Transforming growth factor | ScanRegExp | 311-326 |
| | beta | | |
| IPR001839 | Transforming growth factor | BlastProDom | 279-339 |
| | beta | | |
| IPR001839 | Transforming growth factor | ProfileScan | 289-328 |
| | beta | | |
| IPR003911 | Transforming growth factor | FPrintScan | 163-177, 17-36, 178-193, 195-209, |
| | beta TGFb | | 72-84 |
| IPR003939 | Transforming growth factor, | FPrintScan | 12-31, 135-154, 166-177, 207-219, |
| | beta 1 | | 264-275, 34-43 |
| IPR001839 | Transforming growth factor | HMMPfam | 290-338 |
| | beta | | |
| IPR001111 | Transforming growth factor | HMMPfam | 33-252 |
| | beta (TGFb), N-terminal | | |
| IPR001839 | Transforming growth factor | HMMSmart | 293-357 |
| | beta | | |
| IPR001839 | Transforming growth factor | ScanRegExp | 311-326 |
| | beta | | |
| IPR001839 | Transforming growth factor | BlastProDom | 279-339 |
| | beta | | |
| IPR001839 | Transforming growth factor | ProfileScan | 289-328 |
| | beta | | |

[1805] Variant protein HSTGFB1_P5 (SEQ ID NO:466) is encoded by the following transcript(s): HSTGFB1_T8 (SEQ ID NO:435) and HSTGFB1_T9 (SEQ ID NO:436).

[1806] The coding portion of transcript HSTGFB1_T8 (SEQ ID NO:435) starts at position 1038 and ends at position 2108. The transcript also has the following SNPs as listed in Table 190 (given according to their position on the nucleotide sequence, with the alternative nucleic acid listed; the last column indicates whether the SNP is known or not; the presence of known SNPs in variant protein HSTGFB1_P5 (SEQ ID NO:466) sequence provides support for the deduced sequence of this variant protein according to the present invention).

TABLE 190
Nucleic acid SNPs

| SNP position on | Alternative | Previously |
|---|---|---|
| nucleotide sequence | nucleic acid | known SNP? |
| 181 | C -> A | Yes |
| 205 | C -> T | Yes |
| 206 | T -> A | Yes |
| 211 | G -> C | Yes |
| 214 | G -> | No |
| 289 | C -> | No |
| 390 | G -> C | Yes |
| 585 | G -> A | Yes |
| 651 | C -> T | Yes |
| 762 | C -> A | Yes |
| 789 | C -> A | Yes |
| 896 | C -> T | Yes |
| 1024 | G -> A | Yes |
| 1030 | C -> | No |
| 1030 | C -> T | No |
| 1066 | T -> C | Yes |
| 1111 | G -> C | Yes |
| 1177 | A -> G | Yes |
| 1232 | G -> | No |
| 1443 | A -> C | No |
| 1725 | A -> | No |
| 1725 | A -> T | No |
| 1825 | C -> T | Yes |
| 2000 | C -> T | Yes |
| 2009 | G -> A | Yes |
| 2010 | C -> | No |

[1807] The coding portion of transcript HSTGFB1_T9 (SEQ ID NO:436) starts at position 1038 and ends at position 2108. The transcript also has the following SNPs as listed in Table 191 (given according to their position on the nucleotide sequence, with the alternative nucleic acid listed; the last column indicates whether the SNP is known or not; the presence of known SNPs in variant protein HSTGFB1_P5 (SEQ ID NO:466) sequence provides support for the deduced sequence of this variant protein according to the present invention).

TABLE 191
Nucleic acid SNPs

| SNP position on | Alternative | Previously |
|---|---|---|
| nucleotide sequence | nucleic acid | known SNP? |
| 181 | C -> A | Yes |
| 205 | C -> T | Yes |
| 206 | T -> A | Yes |
| 211 | G -> C | Yes |
| 214 | G -> | No |
| 289 | C -> | No |
| 390 | G -> C | Yes |
| 585 | G -> A | Yes |
| 651 | C -> T | Yes |
| 762 | C -> A | Yes |
| 789 | C -> A | Yes |
| 896 | C -> T | Yes |
| 1024 | G -> A | Yes |
| 1030 | C -> | No |
| 1030 | C -> T | No |
| 1066 | T -> C | Yes |
| 1111 | G -> C | Yes |
| 1177 | A -> G | Yes |
| 1232 | G -> | No |
| 1443 | A -> C | No |
| 1725 | A -> | No |
| 1725 | A -> T | No |
| 1825 | C -> T | Yes |
| 2000 | C -> T | Yes |
| 2009 | G -> A | Yes |
| 2010 | C -> | No |
| 2245 | T -> A | Yes |
| 2428 | C -> T | Yes |

[1808] Variant protein HSTGFB1_P7 (SEQ ID NO:467) according to the present invention has an amino acid sequence; it is encoded by transcript(s) HSTGFB1_T11 (SEQ ID NO:437). An alignment is given to the known protein (Transforming growth factor beta 1 precursor (SEQ ID NO:463)). One or more alignments to one or more previously published protein sequences are given in the alignment table located on the attached CDROM. A brief description of the relationship of the variant protein according to the present invention to each such aligned protein is as follows:

[1809] Comparison report between HSTGFB1_P7 (SEQ ID NO:467) and TGFB1_HUMAN (SEQ ID NO:463):

[1810] 1. An isolated chimeric polypeptide encoding for HSTGFB1_P7 (SEQ ID NO:467), comprising a first amino acid sequence being at least 90% homologous to MPPSGLRLLLLLLPLLWLLVLTPGRPAAGLSTCKTIDMELVKRKRIEAIRGQILSKLRLASPPSQGEV PPGPLPEAVLALYNSTRDRVAGESAEPEPEPEADYYAKEVTRVLMVETHNEIYDKFKQSTHSIYMF FNTSELREAVPEPVLLSRAELRLLRLKLKVEQHVELYQKYSNNSWRYLSNRLLAPSDSPEWLSFDV TGVVRQWLSRGGEIEGFRLSAHCSCDSRDNTLQVDIN corresponding to amino acids 1-237 of TGFB1_HUMAN (SEQ ID NO:463), which also corresponds to amino acids 1-237 of HSTGFB1_P7 (SEQ ID NO:467), and a second amino acid sequence being at least 70%, optionally at least 80%, preferably at least 85%, more preferably at least 90% and most preferably at least 95% homologous to a polypeptide having the sequence APRRRTAACGSCTLTSARTSAGSGSTSPRATMPTSASGPAPTFGAWTRSTARSWPCTTSITRAPRRR RAACRRRWSRCPSCTTWAASPRWSSCPT (SEQ ID NO: 664) corresponding to amino acids 238-332 of HSTGFB1_P7 (SEQ ID NO:467), wherein said first amino acid sequence and second amino acid sequence are contiguous and in a sequential order.

[1811] 2. An isolated polypeptide encoding for a tail of HSTGFB1_P7 (SEQ ID NO:467), comprising a polypeptide being at least 70%, optionally at least about 80%, preferably at least about 85%, more preferably at least about 90% and most preferably at least about 95% homologous to the sequence APRRRTAACGSCTLTSARTSAGSGSTSPRATMPTSASGPAPTFGAWTRSTARSWPCTTSITRAPRRR RAACRRRWSRCPSCTTWAASPRWSSCPT (SEQ ID NO: 664) in HSTGFB1_P7 (SEQ ID NO:467).

[1812] The location of the variant protein was determined according to results from a number of different software programs and analyses, including analyses from SignalP and other specialized programs. The variant protein is believed to be located as follows with regard to the cell: secreted.

[1813] The glycosylation sites of variant protein HSTGFB1_P7 (SEQ ID NO:467), as compared to the known protein Transforming growth factor beta 1 precursor (SEQ ID NO:463), are described in Table 192 (given according to their position(s) on the amino acid sequence in the first column; the second column indicates whether the glycosylation site is present in the variant protein; and the last column indicates whether the position is different on the variant protein).

TABLE 192
Glycosylation site(s)

| Position(s) on known | Present in | Position in |
|---|---|---|
| amino acid sequence | variant protein? | variant protein? |
| 136 | yes | 136 |
| 82 | yes | 82 |
| 176 | yes | 176 |

[1814] The variant protein has the following domains, as determined by using InterPro. The domains are described in Table 193:

TABLE 193
InterPro domain(s)

| | Domain | | |
|---|---|---|---|
| InterPro ID | description | Analysis type | Position(s) on protein |
| IPR003911 | Transforming | FPrintScan | 163-177, 17-36, |
| | growth factor | | 178-193, 195-209, |
| | beta TGFb | | 72-84 |
| IPR003939 | Transforming | FPrintScan | 12-31, 135-154, |
| | growth factor, | | 166-177, 207-219, |
| | beta 1 | | 34-43 |
| IPR001111 | Transforming | HMMPfam | 33-236 |
| | growth factor | | |
| | beta (TGFb), | | |
| | N-terminal | | |

[1815] Variant protein HSTGFB1_P7 (SEQ ID NO:467) is encoded by the following transcript(s): HSTGFB1_T11 (SEQ ID NO:437). The coding portion of transcript HSTGFB1_T11 (SEQ ID NO:437) starts at position 1038 and ends at position 2033. The transcript also has the following SNPs as listed in Table 194 (given according to their position on the nucleotide sequence, with the alternative nucleic acid listed; the last column indicates whether the SNP is known or not; the presence of known SNPs in variant protein HSTGFB1_P7 (SEQ ID NO:467) sequence provides support for the deduced sequence of this variant protein according to the present invention).

TABLE 194
Nucleic acid SNPs

| SNP position on | Alternative | Previously |
|---|---|---|
| nucleotide sequence | nucleic acid | known SNP? |
| 181 | C -> A | Yes |
| 205 | C -> T | Yes |
| 206 | T -> A | Yes |
| 211 | G -> C | Yes |
| 214 | G -> | No |
| 289 | C -> | No |
| 390 | G -> C | Yes |
| 585 | G -> A | Yes |
| 651 | C -> T | Yes |
| 762 | C -> A | Yes |
| 789 | C -> A | Yes |
| 896 | C -> T | Yes |
| 1024 | G -> A | Yes |
| 1030 | C -> | No |
| 1030 | C -> T | No |
| 1066 | T -> C | Yes |
| 1111 | G -> C | Yes |
| 1177 | A -> G | Yes |
| 1232 | G -> | No |
| 1443 | A -> C | No |
| 1725 | A -> | No |
| 1725 | A -> T | No |
| 1852 | C -> T | Yes |
| 1861 | G -> A | Yes |
| 1862 | C -> | No |
| 1967 | G -> | No |
| 1967 | G -> C | No |
| 1968 | C -> | No |
| 1968 | C -> G | No |
| 1999 | G -> | No |
| 2030 | A -> | No |
| 2030 | A -> C | No |
| 2066 | C -> T | No |
| 2121 | C -> T | No |

[1816] Variant protein HSTGFB1_P10 (SEQ ID NO:468) according to the present invention has an amino acid sequence; it is encoded by transcript(s) HSTGFB1_T14 (SEQ ID NO:438). The location of the variant protein was determined according to results from a number of different software programs and analyses, including analyses from SignalP and other specialized programs. The variant protein is believed to be located as follows with regard to the cell: secreted.

[1817] The variant protein has the following domains, as determined by using InterPro. The domains are described in Table 195:

TABLE 195
InterPro domain(s)

| InterPro ID | Domain description | Analysis type | Position(s) on protein |
|---|---|---|---|
| IPR003911 | Transforming growth factor | FPrintScan | 163-177, 17-36, 178-193, 195-209, |
| | beta TGFb | | 72-84 |
| IPR003939 | Transforming growth factor, | FPrintScan | 12-31, 135-154, 166-177, 207-219, |
| | beta 1 | | 34-43 |
| IPR001839 | Transforming growth factor | HMMPfam | 319-370 |
| | beta | | |
| IPR001111 | Transforming growth factor | HMMPfam | 33-236 |
| | beta (TGFb), N-terminal | | |
| IPR001839 | Transforming growth factor | HMMSmart | 311-370 |
| | beta | | |
| IPR001839 | Transforming growth factor | BlastProDom | 318-370 |
| | beta | | |
| IPR001839 | Transforming growth factor | ProfileScan | 319-370 |
| | beta | | |

[1818] Variant protein HSTGFB1_P10 (SEQ ID NO:468) is encoded by the following transcript(s): HSTGFB1_T14 (SEQ ID NO:438). The coding portion of transcript HSTGFB1_T14 (SEQ ID NO:438) starts at position 1038 and ends at position 2147. The transcript also has the following SNPs as listed in Table 196 (given according to their position on the nucleotide sequence, with the alternative nucleic acid listed; the last column indicates whether the SNP is known or not; the presence of known SNPs in variant protein HSTGFB1_P10 (SEQ ID NO:468) sequence provides support for the deduced sequence of this variant protein according to the present invention).

TABLE 196
Nucleic acid SNPs

| SNP position on | Alternative | Previously |
|---|---|---|
| nucleotide sequence | nucleic acid | known SNP? |
| 181 | C -> A | Yes |
| 205 | C -> T | Yes |
| 206 | T -> A | Yes |
| 211 | G -> C | Yes |
| 214 | G -> | No |
| 289 | C -> | No |
| 390 | G -> C | Yes |
| 585 | G -> A | Yes |
| 651 | C -> T | Yes |
| 762 | C -> A | Yes |
| 789 | C -> A | Yes |
| 896 | C -> T | Yes |
| 1024 | G -> A | Yes |
| 1030 | C -> | No |
| 1030 | C -> T | No |
| 1066 | T -> C | Yes |
| 1111 | G -> C | Yes |
| 1177 | A -> G | Yes |
| 1232 | G -> | No |
| 1443 | A -> C | No |
| 1725 | A -> | No |
| 1725 | A -> T | No |
| 1852 | C -> T | Yes |
| 1861 | G -> A | Yes |
| 1862 | C -> | No |
| 2055 | G -> | No |
| 2055 | G -> C | No |
| 2056 | C -> | No |
| 2056 | C -> G | No |
| 2087 | G -> | No |
| 2118 | A -> | No |
| 2118 | A -> C | No |
| 2154 | C -> T | No |
| 2209 | C -> T | No |

[1819] Table 197 below describes the starting and ending position of HSTGFB1_node_{—}7 (SEQ ID NO:443) on the relevant ranscripts. Experimental results for this segment are described below.

TABLE 197
Segment location on transcripts

| | Segment | Segment |
|---|---|---|
| Transcript name | starting position | ending position |
| HSTGFB1_T5 (SEQ ID NO: 433) | 1220 | 1392 |
| HSTGFB1_T6 (SEQ ID NO: 434) | 1220 | 1392 |
| HSTGFB1_T8 (SEQ ID NO: 435) | 1220 | 1392 |
| HSTGFB1_T9 (SEQ ID NO: 436) | 1220 | 1392 |
| HSTGFB1_T11 (SEQ ID NO: 437) | 1220 | 1392 |
| HSTGFB1_T14 (SEQ ID NO: 438) | 1220 | 1392 |

[1820] Table 198 below describes the starting and ending position of HSTGFB1_node_{—}15 (SEQ ID NO:445) on the relevant transcript. Experimental results for this segment are described below.

TABLE 198
Segment location on transcripts

| | Segment | Segment |
|---|---|---|
| Transcript name | starting position | ending position |
| HSTGFB1_T5 (SEQ ID NO: 433) | 1750 | 1888 |

[1821] Table 199 below describes the starting and ending position of HSTGFB1_node_{—}14 (SEQ ID NO:454) on the relevant ranscripts. Experimental results for this segment are described below.

TABLE 199
Segment location on transcripts

| | Segment | Segment |
|---|---|---|
| Transcript name | starting position | ending position |
| HSTGFB1_T5 (SEQ ID NO: 433) | 1672 | 1749 |
| HSTGFB1_T6 (SEQ ID NO: 434) | 1672 | 1749 |
| HSTGFB1_T8 (SEQ ID NO: 435) | 1672 | 1749 |
| HSTGFB1_T9 (SEQ ID NO: 436) | 1672 | 1749 |
| HSTGFB1_T11 (SEQ ID NO: 437) | 1672 | 1749 |
| HSTGFB1_T14 (SEQ ID NO: 438) | 1672 | 1749 |

Expression of transforming growth factor, beta 1 HSTGFB1 transcripts which are detectable by amplicon as depicted in sequence name HSTGFB1seg14-15 (SEQ ID NO: 471) in normal and cancerous colon, breast, ovary and lung tissues:

[1822] Expression of transforming growth factor, beta 1 transcripts detectable by or according to seg14-15, HSTGFB1seg14-15 (SEQ ID NO: 471) amplicon and primers HSTGFB1seg14-15F (SEQ ID NO: 469) and HSTGFB1seg14-15R (SEQ ID NO: 470) was measured by real time PCR. In parallel the expression of four housekeeping genes was measured similarly. Four different cancer panels were checked with different combinations of house keeping genes:

[1823] Colon panel was checked with —PBGD (GenBank Accession No. BC019323 (SEQ ID NO:6); amplicon—PBGD-amplicon (SEQ ID NO:32)), HPRT1 (GenBank Accession No. NM_{—}000194 (SEQ ID NO:5); amplicon—HPRT1-amplicon (SEQ ID NO:35)), RPS27A (GenBank Accession No. NM_{—}002954 (SEQ ID NO:1); RPS27A amplicon (SEQ ID NO: 47)) and G6PD (GenBank Accession No. NM_{—}000402 (SEQ ID NO:8); G6PD amplicon (SEQ ID NO: 44))

[1824] Breast panel was checked with PBGD (GenBank Accession No. BC019323 (SEQ ID NO:6); amplicon—PBGD-amplicon (SEQ ID NO:32)), HPRT1 (GenBank Accession No. NM_{—}000194 (SEQ ID NO:5); amplicon—HPRT1-amplicon (SEQ ID NO:35)), SDHA (GenBank Accession No. NM_{—}004168 (SEQ ID NO:4); amplicon—SDHA-amplicon (SEQ ID NO:29)), and G6PD (GenBank Accession No. NM_{—}000402 (SEQ ID NO:8); G6PD amplicon (SEQ ID NO: 44))

[1825] Lung panel was checked with PBGD (GenBank Accession No. BC019323 (SEQ ID NO:6); amplicon—PBGD-amplicon (SEQ ID NO:32)), HPRT1 (GenBank Accession No. NM_{—}000194 (SEQ ID NO:5); amplicon—HPRT1-amplicon (SEQ ID NO:35)), SDHA (GenBank Accession No. NM_{—}004168 (SEQ ID NO:4); amplicon—SDHA-amplicon (SEQ ID NO:29)), and Ubiquitin (GenBank Accession No. BC000449 (SEQ ID NO:9); amplicon—Ubiquitin-amplicon (SEQ ID NO:50)).

[1826] Ovary panel was checked with PBGD (GenBank Accession No. BC019323 (SEQ ID NO:6); amplicon—PBGD-amplicon (SEQ ID NO:32)), HPRT1 (GenBank Accession No. NM_{—}000194 (SEQ ID NO:5); amplicon—HPRT1-amplicon (SEQ ID NO:35)), SDHA (GenBank Accession No. NM_{—}004168 (SEQ ID NO:4); amplicon—SDHA-amplicon (SEQ ID NO:29)) and GAPDH (GenBank Accession No. BC026907 (SEQ ID NO:3); GAPDH amplicon (SEQ ID NO: 41))

[1827] For each RT sample, the expression of the above amplicon was normalized to the geometric mean of the quantities of the housekeeping genes. The normalized quantity of each RT sample was then divided by the median of the quantities of the normal post-mortem (PM) samples within each panel (Sample Nos. 41, 52, 62-67, 69-71 in colon, 56-60, 63-67 in breast, Sample Nos. 45, 46, 48, 71 in ovary and 47-50, 90-93, 96-99 in lung; “Tissue samples in ovarian cancer testing panel” table 3 above, “Tissue samples in colon cancer testing panel” table 4 above, “Tissue samples in lung cancer testing panel” table 5 above, “Tissue samples in breast cancer testing panel” table 6 above), to obtain a value of fold differential expression for each sample relative to median of the normal PM samples.

[1828] In one experiment that was carried out with each of the above panels, no differential expression in the cancerous samples relative to the normal PM samples was observed.

[1829] Primer pairs are also optionally and preferably encompassed within the present invention; for example, for the above experiment, the following primer pair was used as a non-limiting illustrative example only of a suitable primer pair: HSTGFB1seg14-15F (SEQ ID NO: 469) forward primer; and HSTGFB1seg 14-15R (SEQ ID NO: 470) reverse primer.

[1830] The present invention also preferably encompasses any amplicon obtained through the use of any suitable primer pair; for example, for the above experiment, the following amplicon was obtained as a non-limiting illustrative example only of a suitable amplicon: HSTGFB1seg14-15 (SEQ ID NO: 471).

[1831] Primers:

Forward primer HSTGFB1seg14-15F (SEQ ID NO:469):
TGAGGGCTTTCGCCTTAGC
Reverse primer HSTGFB1seg14-15R (SEQ ID NO:470):
CACACGTCACAACTGGGCAT
Amplicon HSTGFB1seg14-15 (SEQ ID NO:471):
TGAGGGCTTTCGCCTTAGCGCCCACTGCTCCTGTGACAGCAGGGATAACA
CACTGCAAGTGGACATCAACGGTGAGGCCTGCTTCCCCGGCCATGCCCAG
TTGTGACGTGTG

Expression of transforming growth factor, beta 1 HSTGFB1 transcripts which are detectable by amplicon as depicted in sequence name HSTGFB1 junc14-22-23 (SEQ ID NO: 474) in normal and cancerous colon, breast, ovary and lung tissues

[1832] Expression of transforming growth factor, beta 1 transcripts detectable by or according to HSTGFB1 junc14-22-23 (SEQ ID NO: 474) amplicon and primers HSTGFB1 junc14-22-23F (SEQ ID NO: 472) and HSTGFB1 junc14-22-23R (SEQ ID NO: 473) was measured by real time PCR. In parallel the expression of four housekeeping genes was measured similarly. Four different cancer panels were checked with different combinations of house keeping genes:

[1833] Colon panel was checked with —PBGD (GenBank Accession No. BC019323 (SEQ ID NO:6); amplicon—PBGD-amplicon (SEQ ID NO:32)), HPRT1 (GenBank Accession No. NM_{—}000194 (SEQ ID NO:5); amplicon—HPRT1-amplicon (SEQ ID NO:35)), RPS27A (GenBank Accession No. NM_{—}002954 (SEQ ID NO:1); RPS27A amplicon (SEQ ID NO: 47)) and G6PD (GenBank Accession No. NM_{—}000402 (SEQ ID NO:8); G6PD amplicon (SEQ ID NO: 44))

[1834] Breast panel was checked with PBGD (GenBank Accession No. BC019323 (SEQ ID NO:6); amplicon—PBGD-amplicon (SEQ ID NO:32)), HPRT1 (GenBank Accession No. NM_{—}000194 (SEQ ID NO:5); amplicon—HPRT1-amplicon (SEQ ID NO:35)), SDHA (GenBank Accession No. NM_{—}004168 (SEQ ID NO:4); amplicon—SDHA-amplicon (SEQ ID NO:29)), and G6PD (GenBank Accession No. NM_{—}000402 (SEQ ID NO:8); G6PD amplicon (SEQ ID NO: 44))

[1835] Lung panel was checked with PBGD (GenBank Accession No. BC019323 (SEQ ID NO:6); amplicon—PBGD-amplicon (SEQ ID NO:32)), HPRT1 (GenBank Accession No. NM_{—}000194 (SEQ ID NO:5); amplicon—HPRT1-amplicon (SEQ ID NO:35)), SDHA (GenBank Accession No. NM_{—}004168 (SEQ ID NO:4); amplicon—SDHA-amplicon (SEQ ID NO:29)), and Ubiquitin (GenBank Accession No. BC000449 (SEQ ID NO:9); amplicon—Ubiquitin-amplicon (SEQ ID NO:50)).

[1836] Ovary panel was checked with PBGD (GenBank Accession No. BC019323 (SEQ ID NO:6); amplicon—PBGD-amplicon (SEQ ID NO:32)), HPRT1 (GenBank Accession No. NM_{—}000194 (SEQ ID NO:5); amplicon—HPRT1-amplicon (SEQ ID NO:35)), SDHA (GenBank Accession No. NM_{—}004168 (SEQ ID NO:4); amplicon—SDHA-amplicon (SEQ ID NO:29)) and GAPDH (GenBank Accession No. BC026907 (SEQ ID NO:3); GAPDH amplicon (SEQ ID NO: 41))

[1837] For each RT sample, the expression of the above amplicon was normalized to the geometric mean of the quantities of the housekeeping genes. The normalized quantity of each RT sample was then divided by the median of the quantities of the normal post-mortem (PM) samples within each panel (Sample Nos. 41, 52, 62-67, 69-71 in colon, 56-60, 63-67 in breast, Sample Nos. 45, 46, 48, 71 in ovary and 47-50, 90-93, 96-99 in lung; Tables 4, 6, 3, 5 above, “Tissue samples in ovarian cancer testing panel”, “Tissue samples in colon cancer testing panel”, “Tissue samples in lung cancer testing panel”, “Tissue samples in breast cancer testing panel”, respectively), to obtain a value of fold differential expression for each sample relative to median of the normal PM samples.

[1838] In one experiment that was carried out with each of the above panels, no differential expression in the cancerous samples relative to the normal PM samples was observed.

[1839] Primer pairs are also optionally and preferably encompassed within the present invention; for example, for the above experiment, the following primer pair was used as a non-limiting illustrative example only of a suitable primer pair: HSTGFB1 junc14-22-23F (SEQ ID NO: 472) forward primer; and HSTGFB1 junc14-22-23R (SEQ ID NO: 473) reverse primer.

[1840] The present invention also preferably encompasses any amplicon obtained through the use of any suitable primer pair; for example, for the above experiment, the following amplicon was obtained as a non-limiting illustrative example only of a suitable amplicon: HSTGFB1 junc14-22-23 (SEQ ID NO: 474).

[1841] Primers:

Forward primer HSTGFB1junc14-22-23F
(SEQ ID NO:472):
CAAGTGGACATCAACGCTCCA
Reverse primer HSTGFB1junc14-22-23R
(SEQ ID NO:473):
GGGCCAGACGTACCTTGCT
Amplicon HSTGFB1 junc14-22-23 (SEQ ID NO:474):
CAAGTGGACATCAACGCTCCACGGAGAAGAACTGCTGCGTGCGGCAGCTG
TACATTGACTTCCGCAAGGACCTCGGCTGGAAGTGGATCCACGAGCCCAA
GGGCTACCATGCCAACTTCTGCCTCGGGCCCTGCCCCTACATTTGGAGCC
TGGACACGCAGTACAGCAAGGTACGTCTGGCCC

Expression of transforming growth factor, beta 1 HSTGFB1 transcripts which are detectable by amplicon as depicted in sequence name HSTGFB1 seg7WT (SEQ ID NO:477) in normal and cancerous colon, breast, ovary and lung tissues

[1842] Expression of transforming growth factor, beta 1 transcripts detectable by or according to HSTGFB1 seg7WT (SEQ ID NO:477) amplicon and primers HSTGFB1 seg7WT-F (SEQ ID NO:475) and HSTGFB1 seg7WT-R (SEQ ID NO:476) was measured by real time PCR. In parallel the expression of four housekeeping genes was measured similarly. Four different cancer panels were checked with different combinations of house keeping genes:

[1843] Colon panel was checked with —PBGD (GenBank Accession No. BC019323 (SEQ ID NO:6); amplicon—PBGD-amplicon (SEQ ID NO:32)), HPRT1 (GenBank Accession No. NM_{—}000194 (SEQ ID NO:5); amplicon—HPRT1-amplicon (SEQ ID NO:35)), RPS27A (GenBank Accession No. NM_{—}002954 (SEQ ID NO:1); RPS27A amplicon (SEQ ID NO: 47)) and G6PD (GenBank Accession No. NM_{—}000402 (SEQ ID NO:8); G6PD amplicon (SEQ ID NO: 44))

[1844] Breast panel was checked with PBGD (GenBank Accession No. BC019323 (SEQ ID NO:6); amplicon—PBGD-amplicon (SEQ ID NO:32)), HPRT1 (GenBank Accession No. NM_{—}000194 (SEQ ID NO:5); amplicon—HPRT1-amplicon (SEQ ID NO:35)), SDHA (GenBank Accession No. NM_{—}004168 (SEQ ID NO:4); amplicon—SDHA-amplicon (SEQ ID NO:29)), and G6PD (GenBank Accession No. NM_{—}000402 (SEQ ID NO:8); G6PD amplicon (SEQ ID NO: 44))

[1845] Lung panel was checked with PBGD (GenBank Accession No. BC019323 (SEQ ID NO:6); amplicon—PBGD-amplicon (SEQ ID NO:32)), HPRT1 (GenBank Accession No. NM_{—}000194 (SEQ ID NO:5); amplicon—HPRT1-amplicon (SEQ ID NO:35)), SDHA (GenBank Accession No. NM_{—}004168 (SEQ ID NO:4); amplicon—SDHA-amplicon (SEQ ID NO:29)), and Ubiquitin (GenBank Accession No. BC000449 (SEQ ID NO:9); amplicon—Ubiquitin-amplicon (SEQ ID NO:50)).

[1846] Ovary panel was checked with PBGD (GenBank Accession No. BC019323 (SEQ ID NO:6); amplicon—PBGD-amplicon (SEQ ID NO:32)), HPRT1 (GenBank Accession No. NM_{—}000194 (SEQ ID NO:5); amplicon—HPRT1-amplicon (SEQ ID NO:35)), SDHA (GenBank Accession No. NM_{—}004168 (SEQ ID NO:4); amplicon—SDHA-amplicon (SEQ ID NO:29)) and GAPDH (GenBank Accession No. BC026907 (SEQ ID NO:3); GAPDH amplicon (SEQ ID NO: 41))

[1847] For each RT sample, the expression of the above amplicon was normalized to the geometric mean of the quantities of the housekeeping genes. The normalized quantity of each RT sample was then divided by the median of the quantities of the normal post-mortem (PM) samples within each panel (Sample Nos. 41, 52, 62-67, 69-71 in colon, 56-60, 63-67 in breast, Sample Nos. 45, 46, 48, 71 in ovary and 47-50, 90-93, 96-99 in lung; Tables 4, 6, 3, 5 above, “Tissue samples in ovarian cancer testing panel”, “Tissue samples in colon cancer testing panel”, “Tissue samples in lung cancer testing panel”, “Tissue samples in breast cancer testing panel”, respectively), to obtain a value of fold differential expression for each sample relative to median of the normal PM samples.

[1848] In one experiment that was carried out with each of the above panels, no differential expression in the cancerous samples relative to the normal PM samples was observed.

[1849] Primer pairs are also optionally and preferably encompassed within the present invention; for example, for the above experiment, the following primer pair was used as a non-limiting illustrative example only of a suitable primer pair: HSTGFB1 seg7F (SEQ ID NO: 475) forward primer; and HSTGFB1 seg7R (SEQ ID NO: 476) reverse primer.

[1850] The present invention also preferably encompasses any amplicon obtained through the use of any suitable primer pair; for example, for the above experiment, the following amplicon was obtained as a non-limiting illustrative example only of a suitable amplicon: HSTGFB1 seg7 (SEQ ID NO: 477).

[1851] Primers:

Forward primer HSTGFB1 seg7F (SEQ ID NO:475):
GCTCGCCCTGTACAACAGC
Reverse primer HSTGFB1 seg7R (SEQ ID NO:476):
GACCTCCTTGGCGTAGTAGTCG
Amplicon HSTGFB1 seg7 (SEQ ID NO:477):
GCTCGCCCTGTACAACAGCACCCGCGACCGGGTGGCCGGGGAGAGTGCAG
AACCGGAGCCCGAGCCTGAGGCCGACTACTACGCCAAGGAGGTC

Expression of transforming growth factor, beta 1 (HSTGFB1) transcripts which are detectable by amplicon as depicted in sequence name HSTGFB1junc14-22-23 (SEQ ID NO: 474), HSTGFB1seg14-15 (SEQ ID NO: 471) and HSTGFB1 seg7WT (SEQ ID NO:477) in different normal tissues

[1852] Expression of transforming growth factor, beta 1 transcripts detectable by or according to HSTGFB1junc14-22-23 (SEQ ID NO: 474), HSTGFB1seg14-15 (SEQ ID NO: 471) and HSTGFB1 seg7WT (SEQ ID NO:477) amplicons and primers: HSTGFB1junc14-22-23F (SEQ ID NO: 472), HSTGFB1junc14-22-23R (SEQ ID NO: 473), HSTGFB1seg14-15F (SEQ ID NO: 469), HSTGFB1seg14-15R (SEQ ID NO: 470), HSTGFB1 seg7WT-F (SEQ ID NO:475) and HSTGFB1 seg7WT-R (SEQ ID NO:476) was measured by real time PCR. In parallel the expression of four housekeeping genes—RPL19 (GenBank Accession No. NM_{—}000981 (SEQ ID NO:7); RPL19 amplicon (SEQ ID NO: 38)), TATA box (GenBank Accession No. NM_{—}003194 (SEQ ID NO:2); TATA amplicon (SEQ ID NO: 53)), Ubiquitin (GenBank Accession No. BC000449 (SEQ ID NO:9); amplicon—Ubiquitin-amplicon (SEQ ID NO:50)) and SDHA (GenBank Accession No. NM_{—}004168 (SEQ ID NO:4); amplicon—SDHA-amplicon (SEQ ID NO:29)) was measured similarly. For each RT sample, the expression of the above amplicon was normalized to the geometric mean of the quantities of the housekeeping genes. For each amplicon, the normalized quantity of each RT sample was then divided by the median of the quantities of the lung samples (Sample Nos. 15-17, Table 7, “Tissue samples in normal panel”), to obtain a value of relative expression of each sample relative to median of the lung samples.

[1853] FIG. 73 is a histogram showing Expression of transforming growth factor, beta 1 (HSTGFB1) transcripts which are detectable by amplicon as depicted in sequence name HSTGFB1junc14-22-23 (SEQ ID NO: 474) in different normal tissues. FIG. 74 is a histogram showing Expression of transforming growth factor, beta 1 (HSTGFB1) transcripts which are detectable by amplicon as depicted in sequence name HSTGFB1seg14-15 (SEQ ID NO: 471) in different normal tissues. FIG. 75 is a histogram showing Expression of transforming growth factor, beta 1 (HSTGFB1) transcripts which are detectable by amplicon as depicted in sequence name HSTGFB1 seg7WT (SEQ ID NO:477) in different normal tissues.

[1854] HSTGFB1junc14-22-23 Primers and Amplicon:

Forward primer HSTGFB1junc14-22-23F
(SEQ ID NO:472):
CAAGTGGACATCAACGCTCCA
Reverse primer HSTGFB1junc14-22-23R
(SEQ ID NO:473):
GGGCCAGACGTACCTTGCT
Amplicon HSTGFB1junc14-22-23 (SEQ ID NO:474):
CAAGTGGACATCAACGCTCCACGGAGAAGAACTGCTGCGTGCGGCAGCTG
TACATTGACTTCCGCAAGGACCTCGGCTGGAAGTGGATCCACGAGCCCAA
GGGCTACCATGCCAACTTCTGCCTCGGGCCCTGCCCCTACATTTGGAGCC
TGGACACGCAGTACAGCAAGGTACGTCTGGCCC

HSTGFB1seg14-15 Primers and Amplicon:

Forward primer HSTGFB1seg14-15F (SEQ ID NO:469):
TGAGGGCTTTCGCCTTAGC
Reverse primer HSTGFB1seg14-15R (SEQ ID NO:470):
CACACGTCACAACTGGGCAT
Amplicon HSTGFB1seg14-15 (SEQ ID NO:471):
TGAGGGCTTTCGCCTTAGCGCCCACTGCTCCTGTGACAGCAGGGATAACA
CACTGCAAGTGGACATCAACGGTGAGGCCTGCTTCCCCGGCCATGCCCAG
TTGTGACGTGTG

HSTGFB1seg7-WT Primers and Amplicon:

Forward primer HSTGFB1 seg7F (SEQ ID NO:475):
GCTCGCCCTGTACAACAGC
Reverse primer HSTGFB1 seg7R (SEQ ID NO:476):
GACCTCCTTGGCGTAGTAGTCG
Amplicon HSTGFB1 seg7 (SEQ ID NO:477):
GCTCGCCCTGTACAACAGCACCCGCGACCGGGTGGCCGGGGAGAGTGCAG
AACCGGAGCCCGAGCCTGAGGCCGACTACTACGCCAAGGAGGTC

Expression of transforming growth factor, beta 1 transcripts which are detectable by segment 15, in normal and cancerous breast tissues

[1855] Expression of transforming growth factor, beta 1 transcripts detectable by or according to segment 15 was measured with oligonucleotide-based micro-arrays. The results of image intensities for each feature were normalized according to the percentile 95 of the image intensities of all the features on the chip. Then, feature image intensities for replicates of the same oligonucleotide on the chip and replicates of the same sample were averaged. Outlying results were discarded.

[1856] For oligonucleotide HSTGFB1_{—}0_{—}9_{—}56 (SEQ ID NO:13) the averaged intensity determined for every sample was divided by the averaged intensity of all the normal samples (Samples NB 1-3, 5, 6, 8, 11, Table 200, below), to obtain a value of fold up-regulation for each sample relative to the averaged normal samples. These data are presented in a histogram shown in FIG. 76. As is evident from the histogram, the expression of transforming growth factor, beta 1 transcripts detectable with the above oligonucleotides in cancer samples was significantly higher than in the normal samples.

>HSTGFB1_0_9_56 (SEQ ID NO:13)
GTTCCCATCTGCCCCACGCCCCACTTATCTATCCCTCTGAGAGTGTGTGT

TABLE 200

| | | | | | | | | | |
|---|---|---|---|---|---|---|---|---|---|
| Sample | MA- | | | | | | | stage | |
| RT# | TAA | Sample rename | Lot no | source | pathology | age | grade | (TNM) | stage |

Cancer

| | | | | | | | | | |
|---|---|---|---|---|---|---|---|---|---|
| RT-1 | BC-1 | 14-A-IDC G2 | A0135T | ABS | IDC | 37 | 2 | T2N2Mx | |
| RT-2 | BC-2 | 43-B-IDC G2 | A609183 | Biochain | IDC | 40 | 2 | | |
| RT-3 | BC-3 | 54-B-IDC G2 | A605353 | Biochain | IDC | 41 | 2 | | |
| RT-4 | BC-4 | 55-B-IDC G2 | A609179 | Biochain | IDC | 42 | 2 | | |
| RT-5 | BC-5 | 17-A-IDC G2 | 4904020036T | ABS | IDC | 42 | 2-3 | T3N1Mx | |
| RT-6 | BC-6 | 42-A-IDC G3 | 6005020031T | ABS | IDC | 42 | 3 | T1cN0Mx | |
| RT-7 | BC-7 | 7-A-IDC G2 | 7263T | ABS | IDC | 43 | 2 | T1N0M0 | stage 1 |
| RT-8 | BC-8 | 45-B-IDC G2 | A609222 | Biochain | IDC | 44 | 2 | | |
| RT-9 | BC-9 | 12-A-IDC G2 | 1432T | ABS | IDC | 46 | 2 | T2N0M0 | stage |
| | | | | | | | | | 2A |
| RT-10 | BC-10 | 46-B-Carci G2 | A609177 | Biochain | Carcinoma | 48 | 2 | | |
| RT-11 | BC-11 | 16-A-IDC G2 | 4904020032T | ABS | IDC | 49 | 2 | T3N1Mx | |
| RT-12 | BC-12 | 49-B-IDC G2 | A609223 | Biochain | IDC | 54 | 2 | | |
| RT-13 | BC-13 | 32-A-Muc | 7116T | ABS | Mucinous | 54 | | T2N0M0 | stage |
| | | Carci | | | | | | | 2A |
| RT-14 | BC-14 | 45-B-IDC G2 | A609181 | Biochain | IDC | 58 | 2 | | |
| RT-15 | BC-15 | 15-A-IDC G2 | 7259T | ABS | IDC | 59 | 2 | T3N1M0 | stage |
| | | | | | | | | | 3A |
| RT-T6 | BC-16 | 6-A-IDC G1 | 7238T | ABS | IDC | 60 | 1 | T2N0M0 | stage |
| | | | | | | | | | 2A |
| RT-17 | BC-17 | 26-A-IDC G3 | 7249T | ABS | IDC | 60 | 3 | T2N0M0 | stage |
| | | | | | | | | | 2A |
| RT-18 | BC-18 | 13-A-IDC G2 | A0133T | ABS | IDC | 63 | 2 | T2N1aMx | |
| RT-19 | BC-19 | 50-B-IDC G2 | A609224 | Biochain | IDC | 69 | 2 | | |
| RT-20 | BC-20 | 44-B-IDC G2 | A609198 | Biochain | IDC | 77 | 2 | | |
| RT-21 | BC-21 | 51-B-IDC G1 | A605361 | Biochain | IDC | 79 | 1 | | |
| RT-22 | BC-22 | 27-A-IDC G3 | 4907020072T | ABS | IDC | 91 | 3 | T2N0Mx | |
| RT-23 | BC-23 | 3Z5Z4ANH | 3Z5Z4RVE | GCI | IDC | 60 | | | stage |
| | | | | | | | | | 2B |
| RT-24 | BC-24 | 4W2NYAC1 | 4W2NYR9S | GCI | IDC | 39 | | | stage |
| | | | | | | | | | 3B |
| RT-25 | BC-25 | 54NTAAKT | 54NTAR75 | GCI | IDC | 67 | | | stage |
| | | | | | | | | | 2B |
| RT-26 | BC-26 | I2YLEACP | I2YLERVY | GCI | IDC | 60 | | | stage 1 |
| RT-27 | BC-27 | J5MPNA9Q | J5MPNRQI | GCI | IDC | 64 | | | stage |
| | | | | | | | | | 2B |
| RT-28 | BC-28 | KIOE7AI9 | KIOE7RWK | GCI | IDC | 65 | | | stage |
| | | | | | | | | | 3B |
| RT-29 | BC-29 | OLKL4AO6 | OLKL4RZ9 | GCI | IDC | 46 | | | stage |
| | | | | | | | | | 2B |
| RT-30 | BC-30 | RD3F9AFQ | RD3F9RY9 | GCI | IDC | 41 | | | stage |
| | | | | | | | | | 3A |
| RT-31 | BC-31 | SE5BKAEQ | SE5BKRHY | GCI | IDC | 41 | | | stage |
| | | | | | | | | | 2B |
| RT-32 | BC-32 | VK1EJAQE | VK1EJRKH | GCI | IDC | 54 | | | stage 2 |
| RT-33 | BC-33 | YOLOFARG | YOLOFRE7 | GCI | IDC | 62 | | | stage |
| | | | | | | | | | 3A |
| RT-34 | BC-34 | YQ1WWAUV | YQ1WWROR | GCI | IDC | 62 | | | stage |
| | | | | | | | | | 3B |
| RT-35 | BC-35 | YSZ67A48 | YSZ67ROA | GCI | IDC | 46 | | | stage |
| | | | | | | | | | 2A |
| RT-36 | BC-36 | POPHPAZ4 | POPHPRDM | GCI | IDC | 57 | | | stage 1 |
| RT-37 | BC-37 | 5IRTKAXT | 5IRTKRTG | GCI | IDC | 39 | | | stage 1 |
| RT-38 | BC-38 | DSI52AH3 | DSI52RVW | GCI | IDC | 50 | | | stage 1 |
| RT-39 | BC-39 | GETCVAY2 | GETCVRIT | GCI | IDC | 70 | | | stage |
| | | | | | | | | | 2A |
| RT-40 | BC-40 | S2GBYAGC | S2GBYRR1 | GCI | IDC | 56 | | | stage 1 |
| RT-41 | BC-41 | UT3SEAQY | UT3SERM8 | GCI | IDC | 67 | | | stage |
| | | | | | | | | | 2A |
| RT-42 | BC-42 | PVSYXA72 | PVSYXR66 | GCI | IDC | 70 | | | stage |
| | | | | | | | | | 2A |
| RT-43 | BC-43 | 17138 | 30697A1 | Asterand | IDC | 46 | 3 | T2NXM0 | stage |
| | | | | | | | | | 2A |
| RT-44 | BC-44 | 17959 | 31225A1 | Asterand | IDC | 70 | 2 | T1NXM0 | stage 1 |
| RT-45 | BC-45 | 52-B-ILC G1 | A605360 | Biochain | ILC | 60 | 1 | | |
| RT-46 | BC-46 | IS84YAAY | IS84YR6E | GCI | ILC | 67 | | | stage |
| | | | | | | | | | 2B |
| RT-47 | BC-47 | I35USA9G | I35USR7K | GCI | ILC | 70 | | | stage |
| | | | | | | | | | 2A |
| RT-48 | BC-48 | 17090 | 30738A1 | Asterand | ILC | 50 | | T1cNXM0 | stage 1 |
| RT-49 | BC-49 | 42509 | 42509A1 | Asterand | Ductal | 39 | | T1aN0M0 | stage 1 |
| | | | | | Carcinoma | | | | |
| | | | | | In | | | | |
| | | | | | Situ(DCIS) | | | | |

Benign

| | | | | | | |
|---|---|---|---|---|---|---|
| RT-50 | BE-1 | NNP3QA4V | NNP3QRCW | GCI | FIBROADE | 54 |
| | | | | | NOMA OF | |
| | | | | | THE | |
| | | | | | BREAST | |
| RT-51 | BE-2 | QK8IYALU | QK8IYRW1 | GCI | FIBROADE | 41 |
| | | | | | NOMA OF | |
| | | | | | THE | |
| | | | | | BREAST | |
| RT-52 | BE-3 | ZT15MAMR | ZT15MR2Y | GCI | FIBROADE | 34 |
| | | | | | NOMA OF | |
| | | | | | THE | |
| | | | | | BREAST | |
| RT-53 | BE-4 | 11975 | 15478B1 | Asterand | Fibroadenoma | 24 |

Normal

| | | | | | | |
|---|---|---|---|---|---|---|
| RT-54 | BN-1 | 57-B-N | A609233 | Biochain | Normal PM | 34 |
| RT-55 | BN-2 | 59-B-N | A607155 | Biochain | Normal PM | 35 |
| RT-56 | BN-3 | 60-B-N | A609234 | Biochain | Normal PM | 36 |
| RT-57 | BN-4 | 63-Am-N | 26486 | Ambion | Normal PS | 43 |
| RT-58 | BN-5 | 66-Am-N | 36678 | Ambion | Normal PM | 45 |
| RT-59 | BN-6 | 64-Am-N | 23036 | Ambion | Normal PM | 57 |
| RT-60 | BN-7 | 56-B-N | A609235 | Biochain | Normal PM | 59 |
| RT-61 | BN-8 | 65-Am-N | 31410 | Ambion | Normal PM | 63 |
| RT-62 | BN-9 | 67-Am-N | 073P010602086A | Ambion | Normal PM | 64 |
| RT-63 | BN-10 | 58-B-N | A609232 | Biochain | Normal PM | 65 |
| RT-64 | BN-11 | DHLR1NIQ | DHLR1R8J | GCI | Normal PS | 40 |
| RT-65 | BN-12 | 14398 | 20021D1 | Asterand | Normal PS | 49 |

### Description for Cluster S57296

[1857] Cluster S57296 features 6 transcript(s) and 50 segment(s) of interest, the names for which are given in Tables 201 and 202 respectively. The selected protein variants are given in table 203.

TABLE 201
Transcripts of interest
Transcript Name
S57296_1_T75 (SEQ ID NO: 478)
S57296_1_T76 (SEQ ID NO: 479)
S57296_1_T77 (SEQ ID NO: 480)
S57296_1_T78 (SEQ ID NO: 481)
S57296_1_T79 (SEQ ID NO: 482)
S57296_1_T80 (SEQ ID NO: 483)

TABLE 202
Segments of interest

| Segment Name | |
|---|---|
| S57296_1_N11 (SEQ ID NO: 484) | S57296_1_T75 (SEQ ID NO: 478), |
| | S57296_1_T76 (SEQ ID NO: 479), |
| | S57296_1_T77 (SEQ ID NO: 480), |
| | S57296_1_T78 (SEQ ID NO: 481), |
| | S57296_1_T79 (SEQ ID NO: 482) and S57296_1_T80 |
| | (SEQ ID NO: 483) |
| S57296_1_N14 (SEQ ID NO: 485) | S57296_1_T75 (SEQ ID NO: 478), |
| | S57296_1_T76 (SEQ ID NO: 479), |
| | S57296_1_T77 (SEQ ID NO: 480), |
| | S57296_1_T78 (SEQ ID NO: 481), |
| | S57296_1_T79 (SEQ ID NO: 482) and S57296_1_T80 |
| | (SEQ ID NO: 483) |
| S57296_1_N17 (SEQ ID NO: 486) | S57296_1_T75 (SEQ ID NO: 478), |
| | S57296_1_T76 (SEQ ID NO: 479), |
| | S57296_1_T77 (SEQ ID NO: 480), |
| | S57296_1_T78 (SEQ ID NO: 481), |
| | S57296_1_T79 (SEQ ID NO: 482) and S57296_1_T80 |
| | (SEQ ID NO: 483) |
| S57296_1_N20 (SEQ ID NO: 487) | S57296_1_T75 (SEQ ID NO: 478), |
| | S57296_1_T76 (SEQ ID NO: 479), |
| | S57296_1_T77 (SEQ ID NO: 480), |
| | S57296_1_T78 (SEQ ID NO: 481), |
| | S57296_1_T79 (SEQ ID NO: 482) and S57296_1_T80 |
| | (SEQ ID NO: 483) |
| S57296_1_N27 (SEQ ID NO: 488) | S57296_1_T75 (SEQ ID NO: 478), |
| | S57296_1_T76 (SEQ ID NO: 479), |
| | S57296_1_T77 (SEQ ID NO: 480), |
| | S57296_1_T78 (SEQ ID NO: 481), |
| | S57296_1_T79 (SEQ ID NO: 482) and S57296_1_T80 |
| | (SEQ ID NO: 483) |
| S57296_1_N30 (SEQ ID NO: 489) | S57296_1_T75 (SEQ ID NO: 478), |
| | S57296_1_T76 (SEQ ID NO: 479), |
| | S57296_1_T77 (SEQ ID NO: 480), |
| | S57296_1_T78 (SEQ ID NO: 481), |
| | S57296_1_T79 (SEQ ID NO: 482) and S57296_1_T80 |
| | (SEQ ID NO: 483) |
| S57296_1_N32 (SEQ ID NO: 490) | S57296_1_T75 (SEQ ID NO: 478), |
| | S57296_1_T76 (SEQ ID NO: 479), |
| | S57296_1_T77 (SEQ ID NO: 480), |
| | S57296_1_T78 (SEQ ID NO: 481) and S57296_1_T79 |
| | (SEQ ID NO: 482). Table 30 |
| S57296_1_N45 (SEQ ID NO: 491) | S57296_1_T75 (SEQ ID NO: 478), |
| | S57296_1_T76 (SEQ ID NO: 479), |
| | S57296_1_T77 (SEQ ID NO: 480), |
| | S57296_1_T78 (SEQ ID NO: 481) and S57296_1_T79 |
| | (SEQ ID NO: 482) |
| S57296_1_N46 also referred as | S57296_1_T77 (SEQ ID NO: 480) and |
| S57296 B2S seg-44 (SEQ ID NO: 552) | S57296_1_T79 (SEQ ID NO: 482) |
| S57296_1_N47 (SEQ ID NO: 493) | S57296_1_T75 (SEQ ID NO: 478), |
| | S57296_1_T76 (SEQ ID NO: 479) and |
| | S57296_1_T78 (SEQ ID NO: 481) |
| S57296_1_N51 (SEQ ID NO: 494) | S57296_1_T75 (SEQ ID NO: 478), |
| | S57296_1_T76 (SEQ ID NO: 479) and |
| | S57296_1_T78 (SEQ ID NO: 481) |
| S57296_1_N59 (SEQ ID NO: 495) | S57296_1_T75 (SEQ ID NO: 478) and |
| | S57296_1_T76 (SEQ ID NO: 479) |
| S57296_1_N61 (SEQ ID NO: 496) | S57296_1_T78 (SEQ ID NO: 481) |
| S57296_1_N70 (SEQ ID NO: 497); | S57296_1_T78 (SEQ ID NO: 481) |
| also referred as S57296WT seg63 | |
| (SEQ ID NO: 497) | |
| S57296_1_N72 (SEQ ID NO: 498) | S57296_1_T78 (SEQ ID NO: 481) |
| S57296_1_N83 (SEQ ID NO: 499) | S57296_1_T78 (SEQ ID NO: 481) |
| S57296_1_N86 (SEQ ID NO: 500) | S57296_1_T78 (SEQ ID NO: 481) |
| S57296_1_N95 (SEQ ID NO: 501) | S57296_1_T78 (SEQ ID NO: 481) |
| S57296_1_N104 (SEQ ID NO: 502) | S57296_1_T78 (SEQ ID NO: 481) |
| S57296_1_N105 (SEQ ID NO: 503) | S57296_1_T78 (SEQ ID NO: 481) |
| S57296_1_N22 (SEQ ID NO: 504) | S57296_1_T75 (SEQ ID NO: 478), |
| | S57296_1_T76 (SEQ ID NO: 479), |
| | S57296_1_T77 (SEQ ID NO: 480), |
| | S57296_1_T78 (SEQ ID NO: 481), |
| | S57296_1_T79 (SEQ ID NO: 482) and S57296_1_T80 |
| | (SEQ ID NO: 483) |
| S57296_1_N25 (SEQ ID NO: 505) | S57296_1_T75 (SEQ ID NO: 478), |
| | S57296_1_T76 (SEQ ID NO: 479), |
| | S57296_1_T77 (SEQ ID NO: 480), |
| | S57296_1_T78 (SEQ ID NO: 481), |
| | S57296_1_T79 (SEQ ID NO: 482) and S57296_1_T80 |
| | (SEQ ID NO: 483) |
| S57296_1_N35 (SEQ ID NO: 506) | S57296_1_T76 (SEQ ID NO: 479), |
| | S57296_1_T78 (SEQ ID NO: 481) and |
| | S57296_1_T79 (SEQ ID NO: 482) |
| S57296_1_N41 (SEQ ID NO: 507) | S57296_1_T75 (SEQ ID NO: 478), |
| | S57296_1_T76 (SEQ ID NO: 479), |
| | S57296_1_T77 (SEQ ID NO: 480), |
| | S57296_1_T78 (SEQ ID NO: 481), |
| | S57296_1_T79 (SEQ ID NO: 482) and S57296_1_T80 |
| | (SEQ ID NO: 483) |
| S57296_1_N43 (SEQ ID NO: 508) | S57296_1_T75 (SEQ ID NO: 478), |
| | S57296_1_T76 (SEQ ID NO: 479), |
| | S57296_1_T77 (SEQ ID NO: 480), |
| | S57296_1_T78 (SEQ ID NO: 481), |
| | S57296_1_T79 (SEQ ID NO: 482) and |
| | S57296_1_T80 (SEQ ID NO: 483) |
| S57296_1_N49 (SEQ ID NO: 509) | S57296_1_T75 (SEQ ID NO: 478), |
| | S57296_1_T76 (SEQ ID NO: 479) and |
| | S57296_1_T78 (SEQ ID NO: 481) |
| S57296_1_N58 (SEQ ID NO: 510) | S57296_1_T75 (SEQ ID NO: 478), |
| | S57296_1_T76 (SEQ ID NO: 479) and |
| | S57296_1_T7 |
| S57296_1_N63 (SEQ ID NO: 511) | S57296_1_T78 (SEQ ID NO: 481) |
| S57296_1_N64 (SEQ ID NO: 512) | S57296_1_T78 (SEQ ID NO: 481) |
| S57296_1_N65 (SEQ ID NO: 513) | S57296_1_T78 (SEQ ID NO: 481) |
| S57296_1_N67 (SEQ ID NO: 514) | S57296_1_T78 (SEQ ID NO: 481) |
| S57296_1_N75 (SEQ ID NO: 515) | S57296_1_T78 (SEQ ID NO: 481) |
| S57296_1_N77 (SEQ ID NO: 516) | S57296_1_T78 (SEQ ID NO: 481) |
| S57296_1_N78 (SEQ ID NO: 517) | S57296_1_T78 (SEQ ID NO: 481) |
| S57296_1_N81 (SEQ ID NO: 518) | S57296_1_T78 (SEQ ID NO: 481) |
| S57296_1_N84 (SEQ ID NO: 519) | S57296_1_T78 (SEQ ID NO: 481) |
| S57296_1_N87 (SEQ ID NO: 520) | S57296_1_T78 (SEQ ID NO: 481) |
| S57296_1_N88 (SEQ ID NO: 521) | S57296_1_T78 (SEQ ID NO: 481) |
| S57296_1_N89 (SEQ ID NO: 522) | S57296_1_T78 (SEQ ID NO: 481) |
| S57296_1_N90 (SEQ ID NO: 523) | S57296_1_T78 (SEQ ID NO: 481) |
| S57296_1_N93 (SEQ ID NO: 524) | S57296_1_T78 (SEQ ID NO: 481) |
| S57296_1_N94 (SEQ ID NO: 525) | S57296_1_T78 (SEQ ID NO: 481) |
| S57296_1_N96 (SEQ ID NO: 526) | S57296_1_T78 (SEQ ID NO: 481) |
| S57296_1_N97 (SEQ ID NO: 527) | S57296_1_T78 (SEQ ID NO: 481) |
| S57296_1_N98 (SEQ ID NO: 528) | S57296_1_T78 (SEQ ID NO: 481) |
| S57296_1_N99 (SEQ ID NO: 529) | S57296_1_T78 (SEQ ID NO: 481) |
| S57296_1_N100 (SEQ ID NO: 530) | S57296_1_T78 (SEQ ID NO: 481) |
| S57296_1_N101 (SEQ ID NO: 531) | S57296_1_T78 (SEQ ID NO: 481) |
| S57296_1_N102 (SEQ ID NO: 532) | S57296_1_T78 (SEQ ID NO: 481) |
| S57296_1_N103 (SEQ ID NO: 533) | S57296_1_T78 (SEQ ID NO: 481) |

TABLE 203
Proteins of interest

| | Corresponding |
|---|---|
| Protein Name | Transcript(s) |
| S57296_1_P59 (SEQ ID NO: 542) | S57296_1_T78 |
| | (SEQ ID NO: 481) |
| S57296_1_P65 (SEQ ID NO: 543) | S57296_1_T77 |
| | (SEQ ID NO: 480) |
| S57296_1_P85 (SEQ ID NO: 544) | S57296_1_T79 |
| | (SEQ ID NO: 482) |
| S57296_1_P97 (SEQ ID NO: 545) | S57296_1_T80 |
| | (SEQ ID NO: 483) |
| S57296_1_P125 (SEQ ID NO: 546) | S57296_1_T75 |
| | (SEQ ID NO: 478) |
| S57296_1_P127 (SEQ ID NO: 547) | S57296_1_T76 |
| | (SEQ ID NO: 479) |

[1858] These sequences are variants of the known protein Herstatin (SEQ ID NO:534) (SwissProt accession identifier Q9UK79_HUMAN (SEQ ID NO:534)), referred to herein as the previously known protein.

[1859] The following GO Annotation(s) apply to the previously known protein. The following annotation(s) were found: transmembrane receptor protein tyrosine kinase signaling pathway, which are annotation(s) related to Biological Process; non-membrane spanning protein tyrosine kinase activity, which are annotation(s) related to Molecular Function; and extracellular region, which are annotation(s) related to Cellular Component.

[1860] The GO assignment relies on information from one or more of the SwissProt/TremBl Protein knowledgebase, available from <http://www.expasy.ch/sprot/>; or Locuslink, available from <http://www.ncbi.nlm.nih.gov/projects/LocusLink/>.

[1861] According to optional but preferred embodiments of the present invention, variants of this cluster according to the present invention (amino acid and/or nucleic acid sequences of S57296) may optionally have one or more of the following utilities, as described with regard to Table 204 below. It should be noted that these utilities are optionally and preferably suitable for human and non-human animals as subjects, except where otherwise noted. The reasoning is described with regard to biological and/or physiological and/or other information about the known protein, but is given to demonstrate particular diagnostic utility for the variants according to the present invention.

TABLE 204
Utilities for Variants of S57296

| Utility | Reason | Reference |
|---|---|---|
| Gene and protein | Detection of | Science. 1989 May 12; 244(4905): 707-12. |
| over expression in | protein (i.e. | Br J Cancer. 1991 Jul; 64(1): 79-83. |
| breast, ovarian, | western, ICH, | J Pathol. 1989 Oct; 159(2): 107-11. |
| stomach, bladder, | etc.) or mRNA | Cancer Lett. 1993 Nov 30; 75(1): 41-4. |
| salivary, lung, | from the tumor | Cancer Res. 1993 May 15; 53(10 Suppl): 2199-203. |
| prostate cancers | (i.e. RT-PCR, | Genes Chromosomes Cancer. 1991 Mar; 3(2): 128-35. |
| and Paget disease | Northern blot, | Gynecol Oncol. 2004 Nov; 95(2): 336-40. |
| of the vulva and | etc.). | Nature 393: 83-85, 1998 |
| the female breast | | |
| Indication for | Tumors that | Cancer Invest. 2004; 22(6): 858-65. |
| ErbB2 directed | overexpress the | Int J Radiat Oncol Biol Phys. 2005 Jan 1; 61(1): 203-11. |
| therapy | protein are | Cancer Invest. 2004; 22(5): 706-12. |
| (antibodies, small | targets for | Breast Cancer. 2004; 11(2): 105-15. |
| molecules, etc.) | therapy. | Semin Oncol. 2004 Oct; 31(5 Suppl 10): 29-34. |
| Gene over | Gene, mRNA | Slamon DJ, Clark GM, Wong SG et al. Human breast cancer: |
| expression can | over expression | correlation of relapse and survival with amplification of the |
| predict breast | detection. | Her-2/neu oncogene. Science 1987; 235: 177-182. |
| cancer prognosis | Protein levels in | Berger MS, Locher GW, Saurer S et al. Correlation of c-erb B2 |
| and response to | tumor or in | gene amplification and protein expression in human breast |
| anti cancer | serum. Detection | carcinoma with nodal status and nuclear grading. Cancer |
| treatment. | of protein is | Res 1988; 48: 1238-1243. |
| | indicative of | van de Vivjer MJ, Peterse JL, Mooi WJ et al. Neu-protein |
| | poor prognosis | overexpression in breast cancer. N Engl J Med |
| | relative to non | 1988; 319: 1239-1245. |
| | expressing | Heintz NH, Leslie KO, Rogers LA et al. Amplification of the c- |
| | tumors. | erb B-2 oncogene in prognosis of breast adenocarcinoma. |
| | | Arch Pathol Lab Med 1990; 114: 160-163. |
| | | Tsuda H, Hirohashi S, Shimosato Y et al. Correlation between |
| | | histologic grade of malignancy and copy number of c-erbB- |
| | | 2 gene in breast carcinoma. A retrospective analysis of 176 |
| | | cases. Cancer 1990; 65: 1794-1800. |
| | | Borg A, Tandon AK, Sigurdsson H et al. HER-2/neu |
| | | amplification predicts poor survival in node-positive breast |
| | | cancer. Cancer Res 1990; 50: 4332-4337. |
| | | Paik S, Hazan R, Fisher ER et al. Pathologic findings from the |
| | | nations′ surgical adjuvant breast and bowel project: |
| | | prognostic significance of erb B2 protein overexpression in |
| | | primary breast cancer. J Clin Oncol 1990; 8: 103-112. |
| | | Battifora H, Gaffey M, Esteban J et al. Immunohistochemical |
| | | assay of neu/c-erb B-2 oncogene product in paraffin- |
| | | embedded tissues in early breast cancer: Retrospective |
| | | follow-up study of 245 stage I and II cases. Modern Pathol |
| | | 1991; 4: 466-474. |
| | | Kallioniemi OP, Holli K, Visakorpi T et al. Association of C-erb |
| | | B2 protein over-expression with high rate of cell |
| | | proliferation, increased risk of visceral metastasis and poor |
| | | long-term survival in breast cancer. Int J Cancer |
| | | 1991; 49: 650-655. |
| | | Clark GM, McGuire WL. Follow-up study of HER-2/neu |
| | | amplification in primary breast cancer. Cancer Res |
| | | 1991; 51: 944-948. |
| | | Lovekin C, Ellis IO, Locker A et al. C-erb B2 oncoprotein |
| | | expression in primary and advanced breast cancer. Br J |
| | | Cancer 1991; 63: 439-443. |
| | | McCann AH, DeDervan TA, O′Regan M et al. Prognostic |
| | | significance of C-erb B2 and estrogen receptor status in |
| | | human breast cancer. Cancer Res 1991; 51: 3296-3303. |
| | | Dykens R, Corbett IP, Henry J et al. Long term survival in |
| | | breast cancer related to overexpression of the C-erb B2 |
| | | oncoprotein: an immunohistochemical study using |
| | | monoclonal antibody NCL-CB11. J Pathol 1991; 163: 105-110. |
| | | Rilke F, Colnaghi MI, Cascinelli N et al. Prognostic significance |
| | | of HER-2/neu expression in breast cancer and its |
| | | relationship to other prognostic factors. Int J Cancer |
| | | 1991; 49: 44-49. |
| | | Winstanley J, Cooke T, Murray GD et al. The long term |
| | | prognostic significance of C-erb B2 in primary breast |
| | | cancer. Br J Cancer 1991; 63: 447-450. |
| | | O′Reilly SM, Barnes DM, Camplejohn RS et al. The |
| | | relationship between C-erb B2 expression, and s-phase |
| | | fraction in prognosis in breast cancer. Br J Cancer |
| | | 1991; 63: 444-446. |
| | | Paterson MC, Dietrich KD, Danyluk J et al. Correlation between |
| | | C-erb B2 amplification and risk of recurrent disease in |
| | | node-negative breast cancer. Cancer Res 1991; 51: 556-567. |
| | | Toikkanen S, Helin H, Isola J et al. Prognostic significance of |
| | | Her-2 oncoprotein expression in breast cancer: a 30-year |
| | | follow up. J Clin Oncol 1992; 10: 1044-1048. |
| | | Molina R, Ciocca DR, Candon AK et al. Expression of HER- |
| | | 2/neu oncoprotein in breast cancer: a comparison of |
| | | immunohistochemical and western blot techniques. |
| | | Anticancer Res 1992; 12: 1965-1991. |
| | | Noguchi M, Koyasaki M, Ohta N et al. c-erb B-2 oncoprotein |
| | | expression versus internal mammary lymph node |
| | | metastases as additional prognostic factors in patients with |
| | | axillary lymph node-positive breast cancer. Cancer |
| | | 1992; 69: 2953-2960. |
| | | Allred DC, Clark GM, Tandon AK et al. HER-2/neu node- |
| | | negative breast cancer: prognostic significance of |
| | | overexpression influenced by the presence of in-situ |
| | | carcinoma. J Clin Oncol 1992; 10: 599-605. |
| | | Babiak J, Hugh J, Poppeme S. Significance of c-erb B-2 |
| | | amplification in DNA aneuploidy. Analysis in 78 patients |
| | | with node-negative breast cancer. Cancer 1992; 70: 770-776. |
| | | Tiwari RK, Borgen PI, Wong GY et al. HER-2/neu |
| | | amplification and overexpression in primary human breast |
| | | cancer is associated with early metastasis. Anticancer Res |
| | | 1992; 12: 419-426. |
| | | Gusterson BA, Gelber RD. Goldhirsch A et al. Prognostic |
| | | importance of C-erb B2 expression in breast cancer. J Clin |
| | | Oncol 1992; 10: 1049-1056. |
| | | Bianchi S, Paglierani M, Zampi G et al. Prognostic significance |
| | | of C-erb B2 expression in node negative breast cancer. Br J |
| | | Cancer 1993; 67: 625-629. |
| | | Press MF, Pike MC, Chazin VR et al. Her-2/neu expression in |
| | | node-negative breast cancer: direct tissue quantification by |
| | | computerized image analysis and association of |
| | | overexpression with increased risk of recurrent disease. |
| | | Cancer Res 1993; 53: 4960-4970. |
| | | Seshadri R, Firgaira FA, Horsfall DJ et al. Clinical significance |
| | | of Her-2/neu oncogene amplification in primary breast |
| | | cancer. J Clin Oncol 1993; 11: 1936-1942. |
| | | Descotes F, Pavy J-J, Adessi GL. Human breast cancer: |
| | | correlation study between Her-2/neu amplification and |
| | | prognostic factors in an unselected population. Anticancer |
| | | Res 1993; 13: 119-124. |
| | | Giai M, Roagna R, Ponzone R et al. Prognostic and predictive |
| | | relevance of C-erb B2 and ras expression in node-positive |
| | | and negative breast cancer. Anticancer Res 1994; 14: 1441-1450. |
| | | Muss HB, Thor AD, Berry DA et al. Cerb-B2 expression and |
| | | response to adjuvant therapy in women with node-positive |
| | | early breast cancer. N Engl J Med 1994; 330: 1260-1266. |
| | | Tetu B, Brisson J. Prognostic significance of Her-2/neu |
| | | oncogene expression in node-positive breast cancer. The |
| | | influence of the pattern of immunostaining and adjuvant |
| | | therapy. Cancer 1994; 73: 2359-2365. |
| | | Hartmann LC, Ingle JN, Wold LE et al. Prognostic value of |
| | | CerbB2 overexpression in axillary lymph node-positive |
| | | breast cancer. Results from a randomized adjuvant |
| | | treatment protocol. Cancer 1994; 74: 2956-2963. |
| | | Jacquemier J, Penault-Llorca P, Viens P et al. Breast cancer |
| | | response to adjuvant chemotherapy in correlation with erb |
| | | B2 and p53 expression. Anticancer Res 1994; 14: 2773-2778. |
| | | Marks JR, Humphrey PA, Wu K at al. Overexpression of p53 |
| | | and Her-2/neu proteins as prognostic markers in early stage |
| | | breast cancer. Ann Surg 1994; 219: 332-341. |
| | | Rosen PP, Lesser ML, Arroyo CD et al. Immunohistochemical |
| | | detection of Her-2/neu expression in patients with axillary |
| | | lymph node-negative breast carcinoma. A study of |
| | | epidemiologic risk factors, histologic features and |
| | | prognosis. Cancer 1995; 75: 1320-1326. |
| | | Quenel N, Wafflart J, Bonichon F et al. The prognostic value of |
| | | c-erbB2 in primary breast carcinomas: a study on 942 cases. |
| | | Breast Cancer Res Treat 1995; 35: 283-291. |
| | | Sundblad AS, Pellicer EM, Ricci L. Carcinoembryonic |
| | | expression in stages I and II breast cancer; its relationship |
| | | with clinicopathologic factors. Hum Pathol 1996; 27: 297-300. |
| | | O′Malley FP, Saad Z, Kerkvliet N et al. The predictive power of |
| | | semiquantitative immunohistochemical assessment of p53 |
| | | and C-erbB2 in lymph node-negative breast cancer. Hum |
| | | Pathol 1996; 27:955-963. |
| | | Hieken TJ, Mehta RR, Shilkaitis A et al. Her-2/neu and p53 |
| | | expression in breast cancer: valid prognostic markers when |
| | | assessed by direct immunoassay, but not by |
| | | immunochemistry. Proc Annu Meet Am Soc Clin Oncol |
| | | 1996; 15: 113a. |
| Combinations of | Combination of | Stem Cells. 1998; 16(6): 413-28. |
| prognostic factors | detection of | Zafrani B, Leroyer A, Fourquet A et al. Mammographically- |
| in breast cancer | erbb2 with | detected ductal in-situ carcinoma of the breast analyzed with a |
| | estrogen and | new classification. Sem Diagn Pathol 1994; 11: 208-214. |
| | progesterone | Brower FT, Abmed 5, Tartter P et al. Prognostic variables in |
| | receptors, cell | invasive breast cancer: Contribution of comedo versus non- |
| | proliferation | comedo in-situ component. Ann Surg Oncol 1995; 2: 440-444. |
| | index, DNA | Leal CB, Schmitt FC, Bento NJ et al. Ductal carcinoma in-situ of |
| | ploidity, myc, | the breast. Histologic categorization and its relationship to |
| | ras, (and other | ploidy and immunohistochemical expression of hormone |
| | oncogens), p53 | receptors, p53 and C erb B-2 protein. Cancer 1995; 75: 2123-2131. |
| | (and other tumor | Bobrow WLG, Happerfield LC, Gregory WM et al. Ductal |
| | suppressors), | carcinoma in-situ: assessment of necrosis in nuclear morphology |
| | cathepsin D, | and their association with biological markers. J Pathol |
| | PAI1 or uPAI. | 1995; 176: 333-341. |
| Detection of | Protein over | DePotter CR, Schelhout AM, Verbeeck P et al. neu |
| Ductal Carcinoma | expression in | overexpression correlates with extent of disease in large cell |
| in Situ - comedo- | tumors and | ductal in situ carcinoma of the breast. Hum Pathol 1995; 26: 601-606. |
| carcinoma variant | biopsies. | Inaji H, Koyama H, Motomura K et al. Differential distribution |
| | | of erb B2 and pS2 proteins in ductal carcinoma in-situ of the |
| | | breast. Breast Cancer Res Treat 1996; 37: 89-92. |
| | | Albonico G, Querzoli P, Ferretti S et al. Biophenotypes of breast |
| | | carcinoma in-situ defined by image analysis of biological |
| | | parameters. Pathol Res Pract 1996; 192: 117-123. |
| | | Bose S, Lesser ML, Norton L et al. Immunophenotype of |
| | | intraductal carcinoma. Arch Pathol Lab Med 1996; 120: 81-85. |
| | | Moreno A, Lloveras B, Figueras A et al. Ductal carcinoma in- |
| | | situ of the breast: Correlation between histologic classification |
| | | and biologic markers. Mod Pathol 1997; 10: 1088-1092. |
| | | Mack L, Kerkzelit N, Doig G et al. Relationship of a new |
| | | histological categorization of ductal carcinoma in-situ of the |
| | | breast with size and the immunohistochemical expression of |
| | | p53, C-erb B2, bcl2 and ki-67. Hum Pathol 1997; 28: 974-979. |
| Serum levels of | higher levels of | Shepard HM, Lewis GD, Sarup JC et al. Monoclonal antibody |
| ErbB2 can be used | erbb2 in serum | therapy of human cancer: taking the Her-2 proto-oncogene to |
| for detection, | taken from breast | the clinic. J Clin Immunol 1991; 11: 117-127. |
| prognosis, | cancer patients | Zhang L, Chang C, Bacus SS et al. Suppressed transformation |
| treatment | indicate poor | and induced differentiation of Her-2/neu-overexpressing breast |
| selection and | prognosis and | cancer cells by emodin. Cancer Res 1995; 55: 3890-3896. |
| treatment response | treatment | Valone FH, Kaufman PA, Guyre PM et al. Phase Ia/Ib trial of |
| markers. | resistance. | bispecific antibody MDX-210 in patients with advanced breast |
| | | or ovarian cancer that overexpresses the proto-oncogene HER- |
| | | 2/neu. J Clin Oncol 1995; 13: 2281-2292. |
| | | Jinno H, Ueda M, Enomoto K et al. Effectiveness of an |
| | | Adriamycin immunoconjugate that recognizes the CerbB2 |
| | | product on breast cancer cell lines. Surg Today 1996; 26: 501-507. |
| | | Baselga J, Tripathy D, Mendelsohn J et al. Phase II study of |
| | | weekly intravenous recombinant humanized anti p185 Her-2 |
| | | monoclonal antibody in patients with Her-2/neu overexpressing |
| | | metastatic breast cancer. J Clin Oncol 1996; 14: 737-744. |
| | | Liu X, Pogo BG. Inhibition of erbB2 positive breast cancer cell |
| | | growth by erbB2 antisense oligonucleotides. Antisense Nucleic |
| | | Acid Drug Devel 1996; 6: 9-16. |
| | | Wright M, Grim J, Deshane J et al. An intracellular anti-erbB-2 |
| | | single-chain antibody is specifically cytotoxic to human breast |
| | | carcinoma cells overexpressing erbB-2. Gene Ther 1997; 4: 317-322. |
| | | Heijnen IA, Buhring HJ, Deo YN et al. The clinical studies with |
| | | Fc (Gamma) R by specific antibodies and granulocyte colony- |
| | | stimulating factor-primed neutrophils as effector cells against |
| | | HER-2/neu overexpression in breast cancer. Cancer Res |
| | | 1997; 57: 696-701. |
| | | Witters LM, Kumar R, Chinchilli ZM et al. Enhanced anti- |
| | | proliferative activity of the combination of tamoxifen plus HER- |
| | | 2-neu antibody. Breast Cancer Res Treat 1997; 42: 1-5. |
| | | Cobleigh MA, Vogel CL, Tripathy NJ et al. Efficacy and safety |
| | | of Herceptin ® (humanized anti-human HER-2 antibody) as a |
| | | single agent in 222 women with HER2 overexpression who |
| | | relapsed following chemotherapy for metastatic breast cancer. |
| | | Proc Am Soc Clin Oncol 1998; 17: 97a. |
| | | Slamon D, Leyland-Jones B, Shak S et al. Addition of |
| | | Herceptin ® (humanized anti HER2 antibody) to first line |
| | | chemotherapy for HER2 overexpressing metastatic breast |
| | | cancer markedly increases anticancer activity: a randomized, |
| | | multinational controlled phase III trial. Proc Am Soc Clin Oncol |
| | | 1998; 17: 98a. |
| Diagnosis of | Protein over | Am J Obstet Gynecol. 2004 Dec; 191(6): 2106-13. |
| placenta accreta | expressed in | |
| | syncytio- | |
| | trophoblast of | |
| | placenta accrete | |
| | cases. | |
| Graves' disease | MRNA over | Biochim Biophys Acta. 2004 Aug 4; 1673(3): 194-200. |
| detection | expressed in | |
| | thyroid tissue | |
| | from patients | |
| | with Graves's | |
| | disease. | |
| Risk assessment | Preeclampsia is | Clin Chem Lab Med. 2004 Feb; 42(2): 142-6. |
| for preeclampsia | associated with | |
| pregnancies. | increased serum | |
| | levels of | |
| | ERRB2(p105) | |
| | concentration. | |
| Detection of | Oligodendrocytes | J Neuroimmunol. 1999 Dec; 100(1-2): 233-42. |
| multiple sclerosis | of MS patients | Brain Pathol. 1999 Apr; 9(2): 293-311. |
| | expresses higher | |
| | levels of ERBB2 | |
| Detection of lung | A higher | Clin Cancer Res. 2003 Jul; 9(7): 2605-12 |
| cancer is pleural | incidence of | |
| effusion | HER-2/neu | |
| | expression | |
| | beyond the | |
| | cutoff point (5.5 ng/ml) | |
| | in pleural | |
| | effusions was | |
| | also found in | |
| | patients whose | |
| | IHC H-scores | |
| | were >50 | |

[1862] According to other optional embodiments of the present invention, variants of this cluster according to the present invention (amino acid and/or nucleic acid sequences of S57296) may optionally have one or more of the following utilities, some of which are related to utilities described above. It should be noted that these utilities are optionally and preferably suitable for human and non-human animals as subjects, except where otherwise noted.

[1863] A non-limiting example of such a utility is the detection, diagnosis and/or determination of rheumatoid arthritis. The method comprises detecting a S57296 variant, for example a variant protein, protein fragment, peptide, polynucleotide, polynucleotide fragment and/or oligonucleotide as described herein, optionally and preferably in a serum sample and/or in synoviocytes. Such use of the known protein is described with regard to European Patent Application No. EP1275398, hereby incorporated by reference as if fully set forth herein.

[1864] Another non-limiting example of such a utility is the detection, diagnosis and/or determination of breast cancer. The method comprises detecting a S57296 variant, for example a variant protein, protein fragment, peptide, polynucleotide, polynucleotide fragment and/or oligonucleotide as described herein, optionally and preferably in a serum sample and/or in a saliva sample. Such use of the known protein is described with regard to U.S. Pat. No. 6,294,349, hereby incorporated by reference as if fully set forth herein.

[1865] Cluster S57296 belongs to a family of proteins including but not limited to, EGFR, ErbB3 and ErbB4. These functions are described below; one or more variants of cluster S57296 may optionally have one or more diagnostic utilities related to these functions. ErbB3 is overexpressed in a subset of human mammary tumors. For example, high expression is associated with invasion in 41 cases of oral squamous cell carcinoma. —Shintani S. Funayama T. Yoshihama Y. Alcalde R E. Matsumura T Cancer Lett 95: 79-83 (1995). High expression is associated with lymph node metastasis—Shintani S. Funayama T. Yoshihama Y. Alcalde R E. Matsumura T Cancer Lett 95: 79-83 (1995); Overexpressing cells sensitive to H/PE40H/PE40 is a heregulin beta 2 PE40 ligand toxin. —Fiddes R J. Janes P W. Sanderson G M. Sivertsen S P. Sutherland R L. Daly R J. Cell Growth Differ 6: 1567-1577 (1995); Gene copy #<1.75=> decreased survival In primary breast cancer patients. —Brandt B. Vogt U. Schlotter C M. Jackisch C. Werkmeister R. Thomas M. von Eiff M. Bosse U. Assmann G. Zanker K S Gene 159: 35-42 (1995).

[1866] C17orf37 (NM_{—}032339; NP_{—}115715)(also called XTP4, MGC14832) is antisense, tail to tail, to ErbB2, and was found to be transactivated by hepatitis B virus X antigen (HBxAg). Therefore, its expression might serve as indication for hepatitis B infection. (NCBI sequence reference—gi:29468235). This gene may therefore be co-regulated with one or more S57296 variants according to the present invention, and hence may have one or more utilities of S57296 variants according to the present invention as described herein.

[1867] PERLD1 (NM_{—}033419; NP_{—}219487) is antisense, head to head (probably co-regulated), to ErbB2, and is predicted to code for seven-transmembrane receptor with the N-terminal six-cysteine domain and an N-glycosylation site. Also MYC, ERBB2, MET, FGFR2, CCNE1, MYCN, WNT2, CD44, MDM2, NCOA3, IQGAP1 and STK6 loci are amplified in human gastric cancer. It has been reported that PERLD1 is co-amplified with ERBB2 gene in human gastric cancer. (Katoh M, Katoh M Int J Oncol. 2003 June; 22(6):1369-74). This gene may therefore be co-regulated with one or more S57296 variants according to the present invention, and hence may have one or more utilities of S57296 variants according to the present invention as described herein.

[1868] The PPP1R1B-STARD3-TCAP-PNMT-PERLD1-ERBB2-MGC14832-GRB7 locus at human chromosome 17q12 is frequently amplified in human gastric cancer and breast cancer. (Katoh M, Katoh M Int J Oncol. 2004 April; 24(4):757-63). This gene may therefore be co-regulated with one or more S57296 variants according to the present invention, and hence may have one or more utilities of S57296 variants according to the present invention as described herein.

[1869] Table 205 below describes diagnostic utilities for the cluster S57296 that were found through microarrays, including the statistical significance thereof and a reference. One or more S57296 variants according to the present invention may optionally have one or more of these utilities.

TABLE 205

| | Statistical | |
|---|---|---|
| Diagnostic utility | significance | reference |
| Gene over expression in breast ductal | 0.034 | Perou CM, Botstein D Nature |
| carcinoma (vs. normal breast or fibroadenoma). | | (2000) Molecular portraits of |
| | | human breast tumours. |
| Gene over expression in breast adeno- | 0.01 to 0.38 | Sorlie T, Borresen-Dale AL |
| carcinoma and carcinoma (vs normal breast and | | PNAS (2001) Gene expression |
| other cancers). | | patterns of breast carcinomas |
| | | distinguish tumor subclasses |
| | | with clinical implications. |
| | | Ramaswamy S; Golub TR |
| | | PNAS (2001) Multiclass cancer |
| | | diagnosis using tumor gene |
| | | expression signatures. |
| Gene over expressed in sporadic breast cancers | 4.6e⁻⁵ | Van't Veer LJ, Friend SH |
| (vs. BRCA1 & 2 positive cancers). | | Nature (2002) Gene expression |
| | | profiling predicts clinical |
| | | outcome of breast cancer. |
| Gene over expressed in lung adeno-carcinoma | 1e⁻⁴ to 9.2e⁻¹⁵ | Beer DJ, Hanash SM Nature |
| (vs. normal lung, and other lung cancers). | | Medicine (2002) Gene- |
| | | expression profiles predict |
| | | survival of patients with lung |
| | | adenocarcinoma. |
| | | Garber ME, Petersen I PNAS |
| | | (2001) Diversity of gene |
| | | expression in adenocarcinoma |
| | | of the lung. |
| | | Bhattacharjee A, Meyerson M |
| | | PNAS (2001) Classification of |
| | | human lung carcinomas by |
| | | mRNA expression profiling |
| | | reveals distinct adenocarcinoma |
| | | subclasses. |
| Gene over expression in Ovarian | 0.001 to 1e⁻⁵ | Ramaswamy S; Golub TR |
| adenocarcinoma (vs. normal ovary and other | | PNAS (2001) Multiclass cancer |
| cancer types) | | diagnosis using tumor gene |
| | | expression signatures. |
| | | Welsh JB, Hampton GM PNAS |
| | | (2001) Analysis of gene |
| | | expression profiles in normal |
| | | and neoplastic ovarian tissue |
| | | samples identifies candidate |
| | | molecular markers of epithelial |
| | | ovarian cancer. |
| Gene over expressed in Pancreatic | 0.019 to 0.006 | Am J Pathol (2003) Exploration |
| Adenocarcinoma (vs. normal pancreas). | | of global gene expression |
| | | patterns in pancreatic |
| | | adenocarcinoma using cDNA |
| | | microarrays. |
| | | Ramaswamy S; Golub TR |
| | | PNAS (2001) Multiclass cancer |
| | | diagnosis using tumor gene |
| | | expression signatures. |

[1870] Also, microarrays have shown that one or more S57296 variants according to the present invention may be overexpressed in lung cancer, preferably adenocarcinoma.

[1871] Other non-limiting exemplary utilities for S57296 variants according to the present invention are described in greater detail below and also with regard to the previous section on clinical utility.

[1872] Also, it should be noted that one or more S57296 variants optionally and preferably may have one or more therapeutic utilities, as described with regard to PCT Application No. WO 05/033133, hereby incorporated by reference as if fully set forth herein.

[1873] Cluster S57296 can be used as a diagnostic marker according to overexpression of transcripts of this cluster in cancer. Expression of such transcripts in normal tissues is also given according to the previously described methods. The term “number” in the left hand column of the table and the numbers on the y-axis of the figure below refer to weighted expression of ESTs in each category, as “parts per million” (ratio of the expression of ESTs for a particular cluster to the expression of all ESTs in that category, according to parts per million).

[1874] Overall, the following results were obtained as shown with regard to the histograms in FIG. 77 and Table 206. This cluster is overexpressed (at least at a minimum level) in the following pathological conditions: a mixture of malignant tumors from different tissues, uterine malignancies, breast malignant tumors and epithelial malignant tumors. P values and ratios for expression in cancerous tissue are described in table 207

TABLE 206
Normal tissue distribution

| Name of Tissue | Number |
|---|---|
| Brain | 31 |
| Ovary | 109 |
| Bladder | 82 |
| Lung | 82 |
| Pancreas | 20 |
| Liver | 4 |
| Prostate | 41 |
| General | 44 |
| bone marrow | 0 |
| Thyroid | 0 |
| Muscle | 39 |
| Uterus | 4 |
| Colon | 291 |
| Kidney | 72 |
| lymph nodes | 28 |
| Breast | 17 |
| head and neck | 101 |
| Stomach | 3 |
| Epithelial | 66 |
| Bone | 31 |

TABLE 207
P values and ratios for expression in cancerous tissue

| Name of Tissue | P1 | P2 | SP1 | R3 | SP2 | R4 |
|---|---|---|---|---|---|---|
| Brain | 3.3e−01 | 6.0e−01 | 3.9e−01 | 1.3 | 8.6e−01 | 0.6 |
| Ovary | 2.0e−01 | 1.3e−01 | 3.1e−01 | 1.4 | 3.7e−01 | 1.3 |
| Bladder | 3.6e−01 | 3.6e−01 | 3.5e−01 | 1.6 | 4.1e−01 | 1.4 |
| Lung | 7.9e−01 | 8.6e−01 | 7.9e−01 | 0.8 | 9.6e−01 | 0.6 |
| Pancreas | 6.2e−01 | 2.8e−01 | 8.1e−01 | 0.8 | 1.8e−01 | 1.8 |
| liver | 3.3e−01 | 4.9e−01 | 1 | 1.8 | 3.4e−01 | 2.3 |
| prostate | 6.4e−01 | 6.1e−01 | 7.3e−03 | 2.5 | 2.0e−02 | 2.2 |
| general | 2.8e−05 | 1.9e−04 | 8.4e−15 | 2.6 | 3.7e−08 | 1.8 |
| bone marrow | 1 | 7.1e−01 | 1 | 1.0 | 5.4e−01 | 1.9 |
| Thyroid | 2.4e−01 | 2.4e−01 | 1 | 1.3 | 1 | 1.3 |
| muscle | 8.5e−01 | 6.1e−01 | 1 | 0.3 | 1.7e−01 | 1.3 |
| uterus | 8.9e−03 | 4.4e−02 | 1.1e−02 | 5.1 | 6.8e−02 | 3.2 |
| colon | 7.5e−01 | 7.0e−01 | 1 | 0.3 | 1 | 0.3 |
| kidney | 3.5e−01 | 3.0e−01 | 5.4e−01 | 1.1 | 6.4e−01 | 0.9 |
| lymph nodes | 7.4e−01 | 8.7e−01 | 4.9e−01 | 1.4 | 8.2e−01 | 0.7 |
| breast | 1.1e−01 | 1.2e−01 | 2.5e−04 | 3.7 | 1.1e−02 | 2.3 |
| head and neck | 3.4e−01 | 5.0e−01 | 1 | 0.9 | 1 | 0.6 |
| stomach | 1.2e−01 | 8.6e−02 | 2.5e−01 | 2.7 | 5.2e−02 | 3.2 |
| epithelial | 8.9e−03 | 2.2e−02 | 3.9e−07 | 2.0 | 2.3e−03 | 1.5 |
| bone | 2.3e−01 | 4.4e−01 | 6.4e−01 | 1.4 | 6.5e−01 | 1.2 |

[1875] As noted above, cluster S57296 features 6 transcript(s), which were listed in Table 201 above. These transcript(s) encode for protein(s) which are variant(s) of protein Herstatin (SEQ ID NO:534). A description of each variant protein according to the present invention is now provided.

[1876] Variant protein S57296_{—}1_P59 (SEQ ID NO:542) according to the present invention has an amino acid sequence; it is encoded by transcript(s) S57296_{—}1_T78 (SEQ ID NO:481). An alignment is given to the known protein (Herstatin (SEQ ID NO:534)). One or more alignments to one or more previously published protein sequences are given in the alignment table located on the attached CDROM.

### 1. Comparison Report Between S57296_{—}1_P59 (SEQ ID NO:542) and ERB2_HUMAN (SEQ ID NO:538):

[1877] A. An isolated chimeric polypeptide encoding for S57296_{—}1_P59 (SEQ ID NO:542), comprising a first amino acid sequence being at least 90% homologous to MELAALCRWGLLLALLPPGAASTQVCTGTDMKLRLPASPETHLDMLRHLYQGCQVVQGNLELTY LPTNASLSFLQDIQEVQGYVLIAHNQVRQVPLQRLRIVRGTQLFEDNYALAVLDNGDPLNNTTPVT GASPGGLRELQLRSLTEILKGGVLIQRNPQLCYQDTILWKDIFHKNNQLALTLIDTNRSRACHPCSP MCKGSRCWGESSEDCQSLTRTVCAGGCARCKGPLPTDCCHEQCAAGCTGPKHSDCLACLHFNHS GICELHCPALVTYNTDTFESMPNPEGRYTFGASCVTACPYNYLSTDVGSCTLVCPLHNQEVTAEDG TQRCEKCSKPCARVCYGLGMEHLREVRAVTSANIQEFAGCKKIFGSLAFLPESFDG corresponding to amino acids 1-383 of ERB2_HUMAN (SEQ ID NO:538), which also corresponds to amino acids 1-383 of S57296_{—}1_P59 (SEQ ID NO:542), a second amino acid sequence being at least 70%, optionally at least 80%, preferably at least 85%, more preferably at least 90% and most preferably at least 95% homologous to a polypeptide having the sequence VSLCQQAGVQWYDLGSLQPLPPGFKQFSCLSLLSSWDYR (SEQ ID NO: 672) corresponding to amino acids 384-422 of S57296_{—}1_P59 (SEQ ID NO:542), and a third amino acid sequence being at least 90% homologous to DPASNTAPLQPEQLQVFETLEEITGYLYISAWPDSLPDLSVFQNLQVIRGRILHNGAYSLTLQGLGIS WLGLRSLRELGSGLALIHHNTHLCFVHTVPWDQLFRNPHQALLHTANRPEDECVGEGLACHQLC ARGHCWGPGPTQCVNCSQFLRGQECVEECRVLQGLPREYVNARHCLPCHPECQPQNGSVTCFGPE ADQCVACAHYKDPPFCVARCPSGVKPDLSYMPIWKFPDEEGACQPCPINCTHSCVDLDDKGCPAE QRASPLTSIISAVVGILLVVVLGVVFGILIKRRQQKIRKYTMRRLLQETELVEPLTPSGAMPNQAQM RILKETELRKVKVLGSGAFGTVYKGIWIPDGENVKIPVAIKVLRENTSPKANKEILDEAYVMAGVG SPYVSRLLGICLTSTVQLVTQLMPYGCLLDHVRENRGRLGSQDLLNWCMQIAKGMSYLEDVRLV HRDLAARNVLVKSPNHVKITDFGLARLLDIDETEYHADGGKVPIKWMALESILRRRFTHQSDVWS YGVTVWELMTFGAKPYDGIPAREIPDLLEKGERLPQPPICTIDVYMIMVKCWMIDSECRPRFRELV SEFSRMARDPQRFVVIQNEDLGPASPLDSTFYRSLLEDDDMGDLVDAEEYLVPQQGFFCPDPAPGA GGMVHHRHRSSSTRSGGGDLTLGLEPSEEEAPRSPLAPSEGAGSDVFDGDLGMGAAKGLQSLPTH DPSPLQRYSEDPTVPLPSETDGYVAPLTCSPQPEYVNQPDVRPQPPSPREGPLPAARPAGATLERPK TLSPGKNGVVKDVFAFGGAVENPEYLTPQGGAAPQPHPPPAFSPAFDNLYYWDQDPPERGAPPST FKGTPTAENPEYLGLDVPV corresponding to amino acids 384-1255 of ERB2_HUMAN (SEQ ID NO:538), which also corresponds to amino acids 423-1294 of S57296_{—}1_P59 (SEQ ID NO:542), wherein said first amino acid sequence, second amino acid sequence and third amino acid sequence are contiguous and in a sequential order.

[1878] B. An isolated polypeptide encoding for an edge portion of S57296_{—}1_P59 (SEQ ID NO:542), comprising an amino acid sequence being at least 70%, optionally at least about 80%, preferably at least about 85%, more preferably at least about 90% and most preferably at least about 95% homologous to the sequence VSLCQQAGVQWYDLGSLQPLPPGFKQFSCLSLLSSWDYR (SEQ ID NO: 672) of S57296_{—}1_P59 (SEQ ID NO:542).

### 2. Comparison Report Between S57296_{—}1_P59 (SEQ ID NO:542) and NP_{—}004439 (SEQ ID NO:540):

[1879] A. An isolated chimeric polypeptide encoding for S57296_{—}1_P59 (SEQ ID NO:542), comprising a first amino acid sequence being at least 90% homologous to MELAALCRWGLLLALLPPGAASTQVCTGTDMKLRLPASPETHLDMLRHLYQGCQVVQGNLELTY LPTNASLSFLQDIQEVQGYVLIAHNQVRQVPLQRLRIVRGTQLFEDNYALAVLDNGDPLNNTTPVT GASPGGLRELQLRSLTEILKGGVLIQRNPQLCYQDTILWKDIFHKNNQLALTLIDTNRSRACHPCSP MCKGSRCWGESSEDCQSLTRTVCAGGCARCKGPLPTDCCHEQCAAGCTGPKHSDCLACLHFNHS GICELHCPALVTYNTDTFESMPNPEGRYTFGASCVTACPYNYLSTDVGSCTLVCPLHNQEVTAEDG TQRCEKCSKPCARVCYGLGMEHLREVRAVTSANIQEFAGCKKIFGSLAFLPESFDG corresponding to amino acids 1-383 of NP_{—}004439 (SEQ ID NO:540), which also corresponds to amino acids 1-383 of S57296_{—}1_P59 (SEQ ID NO:542), a second amino acid sequence being at least 70%, optionally at least 80%, preferably at least 85%, more preferably at least 90% and most preferably at least 95% homologous to a polypeptide having the sequence VSLCQQAGVQWYDLGSLQPLPPGFKQFSCLSLLSSWDYR (SEQ ID NO: 672) corresponding to amino acids 384-422 of S57296_{—}1_P59 (SEQ ID NO:542), and a third amino acid sequence being at least 90% homologous to DPASNTAPLQPEQLQVFETLEEITGYLYISAWPDSLPDLSVFQNLQVIRGRILHNGAYSLTLQGLGIS WLGLRSLRELGSGLALIHHNTHLCFVHTVPWDQLFRNPHQALLHTANRPEDECVGEGLACHQLC ARGHCWGPGPTQCVNCSQFLRGQECVEECRVLQGLPREYVNARHCLPCHPECQPQNGSVTCFGPE ADQCVACAHYKDPPFCVARCPSGVKPDLSYMPIWKFPDEEGACQPCPINCTHSCVDLDDKGCPAE QRASPLTSIISAVVGILLVVVLGVVFGILIKRRQQKIRKYTMRRLLQETELVEPLTPSGAMPNQAQM RILKETELRKVKVLGSGAFGTVYKGIWIPDGENVKIPVAIKVLRENTSPKANKEILDEAYVMAGVG SPYVSRLLGICLTSTVQLVTQLMPYGCLLDHVRENRGRLGSQDLLNWCMQIAKGMSYLEDVRLV HRDLAARNVLVKSPNHVKITDFGLARLLDIDETEYHADGGKVPIKWMALESILRRRFTHQSDVWS YGVTVWELMTFGAKPYDGIPAREIPDLLEKGERLPQPPICTIDVYMIMVKCWMIDSECRPRFRELV SEFSRMARDPQRFVVIQNEDLGPASPLDSTFYRSLLEDDDMGDLVDAEEYLVPQQGFFCPDPAPGA GGMVHHRIIRSSSTRSGGGDLTLGLEPSEEEAPRSPLAPSEGAGSDVFDGDLGMGAAKGLQSLPTH DPSPLQRYSEDPTVPLPSETDGYVAPLTCSPQPEYVNQPDVRPQPPSPREGPLPAARPAGATLERPK TLSPGKNGVVKDVFAFGGAVENPEYLTPQGGAAPQPHPPPAFSPAFDNLYYWDQDPPERGAPPST FKGTPTAENPEYLGLDVPV corresponding to amino acids 384-1255 of NP_{—}004439 (SEQ ID NO:540), which also corresponds to amino acids 423-1294 of S57296_{—}1_P59 (SEQ ID NO:542), wherein said first amino acid sequence, second amino acid sequence and third amino acid sequence are contiguous and in a sequential order.

[1880] B. An isolated polypeptide encoding for an edge portion of S57296_{—}1_P59 (SEQ ID NO:542), comprising an amino acid sequence being at least 70%, optionally at least about 80%, preferably at least about 85%, more preferably at least about 90% and most preferably at least about 95% homologous to the sequence VSLCQQAGVQWYDLGSLQPLPPGFKQFSCLSLLSSWDYR (SEQ ID NO: 672) of S572961_P59 (SEQ ID NO:542).

### 3. Comparison Report Between S57296_{—}1_P59 (SEQ ID NO:542) and NP_{—}001005862 (SEQ ID NO:539):

[1881] A. An isolated chimeric polypeptide encoding for S57296_{—}1_P59 (SEQ ID NO:542), comprising a first amino acid sequence being at least 70%, optionally at least 80%, preferably at least 85%, more preferably at least 90% and most preferably at least 95%, homologous to a polypeptide having the sequence MELAALCRWGLLLALLPPGAASTQVCTGTD (SEQ ID NO: 673) corresponding to amino acids 1-30 of S57296_{—}1_P59 (SEQ ID NO:542), a second amino acid sequence being at least 70%, optionally at least 80%, preferably at least 85%, more preferably at least 90% and most preferably at least 95% homologous to a polypeptide having the sequence MKLRLPASPETHLDMLRHLYQGCQVVQGNLELTYLPTNA (SEQ ID NO: 674) corresponding to amino acids 384-422 of S57296_{—}1_P59 (SEQ ID NO:542), a third amino acid sequence being at least 90% homologous to SLSFLQDIQEVQGYVLIAHNQVRQVPLQRLRIVRGTQLFEDNYALAVLDNGDPLNNTTPVTGASPG GLRELQLRSLTEILKGGVLIQRNPQLCYQDTILWKDIFHKNNQLALTLIDTNRSRACHPCSPMCKGS RCWGESSEDCQSLTRTVCAGGCARCKGPLPTDCCHEQCAAGCTGPKHSDCLACLHFNHSGICELH CPALVTYNTDTFESMPNPEGRYTFGASCVTACPYNYLSTDVGSCTLVCPLHNQEVTAEDGTQRCE KCSKPCARVCYGLGMEHLREVRAVTSANIQEFAGCKKIFGSLAFLPESFDGDPASNTAPLQPEQLQ VFETLEEITGYLYISAWPDSLPDLSVFQNLQVIRGRILHNGAYSLTLQGLGISWLGLRSLRELGSGLA LIHHNTHLCFVHTVPWDQLFRNPHQALLHTANRPEDECVGEGLACHQLCARGHCWGPGPTQCVN CSQFLRGQECVEECRVLQGLPREYVNARHCLPCHPECQPQNGSVTCFGPEADQCVACAHYKDPPF CVARCPSGVKPDLSYMPIWKFPDEEGACQPCPINCTHSCVDLDDKGCPAEQRASPLTSIISAVVGIL LVVVLGVVFGILIKRRQQKIRKYTMRRLLQETELVEPLTPSGAMPNQAQMRILKETELRKVKVLGS GAFGTVYKGIWIPDGENVKIPVAIKVLRENTSPKANKEILDEAYVMAGVGSPYVSRLLGICLTSTV QLVTQLMPYGCLLDHVRENRGRLGSQDLLNWCMQIAKGMSYLEDVRLVHRDLAARNVLVKSPN HVKITDFGLARLLDIDETEYHADGGKVPIKWMALESILRRRFTHQ corresponding to amino acids 354-1225 of NP_{—}001005862 (SEQ ID NO:539), which also corresponds to amino acids 423-1294 of S57296_{—}1_P59 (SEQ ID NO:542), and a fourth amino acid sequence being at least 90% homologous to SDVWSYGVTVWELMTFGAKPYDGIPAREIPDLLEKGERLPQPPICTIDVYMIMVKCWMIDSECRPR FRELVSEFSRMARDPQRFVVIQNEDLGPASPLDSTFYRSLLEDDDMGDLVDAEEYLVPQQGFFCPD PAPGAGGMVHHRHRSSSTRSGGGDLTLGLEPSEEEAPRSPLAPSEGAGSDVFDGDLGMGAAKGLQ SLPTHDPSPLQRYSEDPTVPLPSETDGYVAPLTCSPQPEYVNQPDVRPQPPSPREGPLPAARPAGAT LERPKTLSPGKNGVVKDVFAFGGAVENPEYLTPQGGAAPQPHPPPAFSPAFDNLYYWDQDPPERG APPSTFKGTPTAENPEYLGLDVPV corresponding to amino acids 1-353 of NP_{—}001005862 (SEQ ID NO:539), which also corresponds to amino acids 31-383 of S57296_{—}1_P59 (SEQ ID NO:542), wherein said first amino acid sequence, second amino acid sequence, third amino acid sequence and fourth amino acid sequence are contiguous and in a sequential order.

[1882] B. An isolated polypeptide encoding for a head of S57296_{—}1_P59 (SEQ ID NO:542), comprising a polypeptide being at least 70%, optionally at least about 80%, preferably at least about 85%, more preferably at least about 90% and most preferably at least about 95% homologous to the sequence MELAALCRWGLLLALLPPGAASTQVCTGTD (SEQ ID NO: 673) of S57296_{—}1_P59 (SEQ ID NO:542).

[1883] C. An isolated polypeptide encoding for an edge portion of S57296_{—}1_P59 (SEQ ID NO:542), comprising an amino acid sequence being at least 70%, optionally at least about 80%, preferably at least about 85%, more preferably at least about 90% and most preferably at least about 95% homologous to the sequence MKLRLPASPETHLDMLRHLYQGCQVVQGNLELTYLPTNA (SEQ ID NO: 674) of S57296_{—}1_P59 (SEQ ID NO:542).

[1884] The location of the variant protein was determined according to results from a number of different software programs and analyses, including analyses from SignalP and other specialized programs. The variant protein is believed to be located as follows with regard to the cell: membrane. The protein localization is believed to be membrane because although both signal-peptide prediction programs agree that this protein has a signal peptide, both trans-membrane region prediction programs predict that this protein has a trans-membrane region downstream of this signal peptide.

[1885] Variant protein S57296_{—}1_P59 (SEQ ID NO:542) also has the following non-silent SNPs (Single Nucleotide Polymorphisms) as listed in Table 208, (given according to their position(s) on the amino acid sequence, with the alternative amino acid(s) listed; the last column indicates whether the SNP is known or not; the presence of known SNPs in variant protein S57296_{—}1_P59 (SEQ ID NO:542) sequence provides support for the deduced sequence of this variant protein according to the present invention).

TABLE 208
Amino acid mutations

| SNP position(s) on | Alternative | |
|---|---|---|
| amino acid sequence | amino acid(s) | Previously known SNP? |
| 3 | A -> T | No |
| 105 | Q -> * | No |
| 112 | A -> V | No |
| 131 | A -> G | No |
| 327 | T -> A | No |
| 369 | I -> N | No |
| 465 | N -> D | No |
| 490 | W -> C | Yes |
| 692 | I -> V | Yes |
| 693 | I -> V | Yes |
| 701 | L -> V | No |
| 709 | F -> | No |
| 769 | F -> L | No |
| 793 | L -> W | No |
| 796 | N -> D | No |
| 817 | S -> | No |
| 822 | R -> | No |
| 843 | C -> | No |
| 851 | N -> K | No |
| 852 | R -> | No |
| 868 | A -> | No |
| 885 | A -> | No |
| 885 | A -> G | No |
| 919 | G -> E | No |
| 922 | V -> A | No |
| 965 | P -> R | Yes |
| 1019 | R -> | No |
| 1072 | D -> G | No |
| 1108 | A -> | No |
| 1138 | S -> | No |
| 1158 | L -> | No |
| 1172 | S -> G | No |
| 1193 | G -> | No |
| 1208 | P -> A | Yes |
| 1214 | G -> | No |
| 1238 | Q -> | No |
| 1257 | N -> | No |
| 1264 | D -> Y | No |
| 1277 | G -> | No |

[1886] The variant protein has the following domains, as determined by using InterPro. The domains are described in Table 209:

TABLE 209
InterPro domain(s)

| Domain description | Analysis type | Position(s) on protein |
|---|---|---|
| Protein kinase | BlastProDom | 763-1022 |
| Tyrosine protein kinase | FPrintScan | 837-850, 874-892, |
| | | 923-933, 942-964, |
| | | 986-1008 |
| Protein kinase | HMMPfam | 759-1015 |
| Furin-like cysteine rich region | HMMPfam | 189-343 |
| Epidermal growth-factor | HMMPfam | 52-173, 426-525 |
| receptor (EGFR), L domain | | |
| Tyrosine protein kinase | HMMSmart | 759-1015 |
| Serine | HMMSmart | 759-1016 |
| Furin-like repeat | HMMSmart | 232-275, 540-591, |
| | | 596-645 |
| Protein kinase | ProfileScan | 759-1026 |
| Calcium-binding EF-hand | ScanRegExp | 1050-1062 |
| Protein kinase | ScanRegExp | 765-792 |
| Tyrosine protein kinase, active | ScanRegExp | 880-892 |
| site | | |
| Placeholder for matches | Seg | 3-21, 492-506, |
| with an unknown IPR | | 697-714, 1083-1102, |
| | | 1238-1256 |

[1887] Variant protein S57296_{—}1_P59 (SEQ ID NO:542) is encoded by the following transcript(s): S57296_{—}1_T78 (SEQ ID NO:481). The coding portion of transcript S57296_{—}1_T78 (SEQ ID NO:481) starts at position 238 and ends at position 4119. The transcript also has the following SNPs as listed in Table 210 (given according to their position on the nucleotide sequence, with the alternative nucleic acid listed; the last column indicates whether the SNP is known or not; the presence of known SNPs in variant protein S57296_{—}1_P59 (SEQ ID NO:542) sequence provides support for the deduced sequence of this variant protein according to the present invention).

TABLE210
Nucleic acid SNPs

| SNP position on nucleotide | Alternative | |
|---|---|---|
| sequence | nucleic acid | Previously known SNP? |
| 155 | -> T | No |
| 160 | C -> T | No |
| 246 | G -> A | No |
| 335 | G -> A | Yes |
| 552 | C -> T | No |
| 574 | C -> T | No |
| 617 | C -> G | Yes |
| 631 | C -> G | No |
| 764 | C -> T | No |
| 1218 | A -> G | No |
| 1345 | T -> A | No |
| 1511 | C -> T | No |
| 1535 | A -> G | No |
| 1632 | A -> G | No |
| 1679 | G -> T | Yes |
| 1709 | G -> T | Yes |
| 1724 | A -> G | Yes |
| 1931 | C -> T | No |
| 2039 | G -> A | Yes |
| 2313 | A -> G | Yes |
| 2316 | A -> G | Yes |
| 2340 | C -> G | No |
| 2345 | C -> A | No |
| 2364 | T -> | No |
| 2531 | T -> G | No |
| 2546 | T -> G | No |
| 2617 | T -> G | No |
| 2625 | A -> G | No |
| 2689 | C -> | No |
| 2705 | C -> G | No |
| 2705 | C -> | No |
| 2768 | C -> | No |
| 2792 | C -> G | No |
| 2795 | C -> G | No |
| 2795 | C -> | No |
| 2842 | C -> | No |
| 2893 | C -> G | No |
| 2893 | C -> | No |
| 2995 | G -> A | No |
| 3004 | T -> C | No |
| 3086 | T -> C | No |
| 3133 | C -> G | Yes |
| 3295 | G -> | No |
| 3317 | C -> T | No |
| 3423 | C -> T | Yes |
| 3431 | C -> T | Yes |
| 3454 | A -> G | No |
| 3515 | T -> C | No |
| 3562 | C -> | No |
| 3652 | G -> | No |
| 3711 | C -> | No |
| 3753 | A -> G | No |
| 3818 | C -> | No |
| 3821 | T -> C | No |
| 3861 | C -> G | Yes |
| 3879 | G -> | No |
| 3884 | G -> A | Yes |
| 3953 | G -> | No |
| 4009 | A -> | No |
| 4029 | G -> T | No |
| 4058 | C -> T | Yes |
| 4070 | G -> | No |
| 4126 | G -> T | Yes |
| 4187 | C -> T | Yes |
| 4196 | A -> | Yes |
| 4226 | G -> | No |
| 4531 | C -> G | No |
| 4531 | C -> | No |
| 4534 | C -> G | Yes |
| 4646 | G -> C | No |
| 4646 | G -> | No |
| 4712 | T -> C | Yes |

[1888] Variant protein S57296_{—}1_P65 (SEQ ID NO:543) according to the present invention has an amino acid sequence; it is encoded by transcript(s) S57296_{—}1_T77 (SEQ ID NO:480). An alignment is given to the known protein (Herstatin (SEQ ID NO:534)). One or more alignments to one or more previously published protein sequences are given in the alignment table located on the attached CDROM.

### Comparison Report Between S57296_{—}1_P65 (SEQ ID NO:543) and Q9UK79_HUMAN (SEQ ID NO:534):

[1889] A. An isolated chimeric polypeptide encoding for S57296_{—}1_P65 (SEQ ID NO:543), comprising a first amino acid sequence being at least 90% homologous to MELAALCRWGLLLALLPPGAASTQVCTGTDMKLRLPASPETHLDMLRHLYQGCQVVQGNLELTY LPTNASLSFLQDIQEVQGYVLIAHNQVRQVPLQRLRIVRGTQLFEDNYALAVLDNGDPLNNTTPVT GASPGGLRELQLRSLTEILKGGVLIQRNPQLCYQDTILWKDIFHKNNQLALTLIDTNRSRACHPCSP MCKGSRCWGESSEDCQSLTRTVCAGGCARCKGPLPTDCCHEQCAAGCTGPKHSDCLACLHFNHS GICELHCPALVTYNTDTFESMPNPEGRYTFGASCVTACPYNYLSTDVGSCTLVCPLHNQEVTAEDG TQRCEKCSKPCAR corresponding to amino acids 1-340 of Q9UK79_HUMAN (SEQ ID NO:534), which also corresponds to amino acids 1-340 of S57296_{—}1_P65 (SEQ ID NO:543), and a second amino acid sequence being at least 70%, optionally at least 80%, preferably at least 85%, more preferably at least 90% and most preferably at least 95% homologous to a polypeptide having the sequence VCYGLGMEHLREVRAVTSANIQEFAGCKKIFGSLAFLPESFDGDPASNTAPLQPEQLQVFETLEEIT GYLYISAWPDSLPDLSVFQNLQVIRGRILHNGAYSLTLQGLGISWLGLRSLRELGSGLALIHHNTHL CFVHTVPWDQLFRNPHQALLHTANRPEDECGKTGSPVCALPICQHTAVPRGPWQQRSWTCADCP SLCTLLDSAQLWLAWPLGMASLAGSYLPWHPSLPLCF (SEQ ID NO: 675) corresponding to amino acids 341-575 of S57296_{—}1_P65 (SEQ ID NO:543), wherein said first amino acid sequence and second amino acid sequence are contiguous and in a sequential order.

[1890] B. An isolated polypeptide encoding for an edge portion of S57296_{—}1_P65 (SEQ ID NO:543), comprising an amino acid sequence being at least 70%, optionally at least about 80%, preferably at least about 85%, more preferably at least about 90% and most preferably at least about 95% homologous to the sequence

(SEQ ID NO:543)

VCYGLGMEHLREVRAVTSANIQEFAGCKKIFGSLAFLPESFDGDPASNTA
PLQPEQLQVFETLEEITGYLYISAWPDSLPDLSVFQNLQVIRGRILHNGA
YSLTLQGLGISWLGLRSLRELGSGLALIHHNTHLCFVHTVPWDQLFRNPH
QALLHTANRPEDECGKTGSPVCALPICQHTAVPRGPWQQRSWTCADCPSL
CTLLDSAQLWLAWPLGMASLAGSYLPWHPSLPLCF
(SEQ ID NO: 675) of S57296_1_P65.

[1891] The location of the variant protein was determined according to results from a number of different software programs and analyses, including analyses from SignalP and other specialized programs. The variant protein is believed to be located as follows with regard to the cell: secreted. The protein localization is believed to be secreted because both signal-peptide prediction programs predict that this protein has a signal peptide, and neither trans-membrane region prediction program predicts that this protein has a trans-membrane region.

[1892] Variant protein S57296_{—}1_P65 (SEQ ID NO:543) also has the following non-silent SNPs (Single Nucleotide Polymorphisms) as listed in Table 211, (given according to their position(s) on the amino acid sequence, with the alternative amino acid(s) listed; the last column indicates whether the SNP is known or not; the presence of known SNPs in variant protein S57296_{—}1_P65 (SEQ ID NO:543) sequence provides support for the deduced sequence of this variant protein according to the present invention).

TABLE 211
Amino acid mutations

| SNP position(s) on amino acid | Alternative | |
|---|---|---|
| sequence | amino acid(s) | Previously known SNP? |
| 3 | A -> T | No |
| 105 | Q -> * | No |
| 112 | A -> V | No |
| 131 | A -> G | No |
| 327 | T -> A | No |
| 369 | I -> N | No |
| 426 | N -> D | No |
| 451 | W -> C | Yes |

[1893] The variant protein has the following domains, as determined by using InterPro. The domains are described in Table 212:

TABLE 212
InterPro domain(s)

| | | Position(s) |
|---|---|---|
| Domain description | Analysis type | on protein |
| Furin-like cysteine rich region | HMMPfam | 189-343 |
| Epidermal growth-factor receptor | HMMPfam | 52-173, 366-486 |
| (EGFR), L domain | | |
| Furin-like repeat | HMMSmart | 232-275 |
| Placeholder for matches with an | Seg | 3-21, 453-467 |
| unknown IPR | | |

[1894] Variant protein S57296_{—}1_P65 (SEQ ID NO:543) is encoded by the following transcript(s): S57296_{—}1T77 (SEQ ID NO:480). The coding portion of transcript S57296_{—}1_T77 (SEQ ID NO:480) starts at position 238 and ends at position 1962. The transcript also has the following SNPs as listed in Table 213 (given according to their position on the nucleotide sequence, with the alternative nucleic acid listed; the last column indicates whether the SNP is known or not; the presence of known SNPs in variant protein S57296_{—}1_P65 (SEQ ID NO:543) sequence provides support for the deduced sequence of this variant protein according to the present invention).

TABLE 213
Nucleic acid SNPs

| SNP position on nucleotide | Alternative | Previously |
|---|---|---|
| sequence | nucleic acid | known SNP? |
| 155 | -> T | No |
| 160 | C -> T | No |
| 246 | G -> A | No |
| 335 | G -> A | Yes |
| 552 | C -> T | No |
| 574 | C -> T | No |
| 617 | C -> G | Yes |
| 631 | C -> G | No |
| 764 | C -> T | No |
| 1218 | A -> G | No |
| 1345 | T -> A | No |
| 1394 | C -> T | No |
| 1418 | A -> G | No |
| 1515 | A -> G | No |
| 1562 | G -> T | Yes |
| 1592 | G -> T | Yes |
| 1607 | A -> G | Yes |

[1895] Variant protein S57296_{—}1_P85 (SEQ ID NO:544) according to the present invention has an amino acid sequence; it is encoded by transcript(s) S57296_{—}1_T79 (SEQ ID NO:482). An alignment is given to the known protein (Herstatin (SEQ ID NO:534)). One or more alignments to one or more previously published protein sequences are given in the alignment table located on the attached CDROM.

### Comparison Report Between S57296_{—}1_P85 (SEQ ID NO:544) and Q9UK79_HUMAN (SEQ ID NO:534):

[1896] A. An isolated chimeric polypeptide encoding for S57296_{—}1_P85 (SEQ ID NO:544), comprising a first amino acid sequence being at least 90% homologous to MELAALCRWGLLLALLPPGAASTQVCTGTDMKLRLPASPETHLDMLRHLYQGCQVVQGNLELTY LPTNASLSFLQDIQEVQGYVLIAHNQVRQVPLQRLRIVRGTQLFEDNYALAVLDNGDPLNNTTPVT GASPGGLRELQLRSLTEILKGGVLIQRNPQLCYQDTILWKDIFHKNNQLALTLIDTNRSRACHPCSP MCKGSRCWGESSEDCQSLTRTVCAGGCARCKGPLPTDCCHEQCAAGCTGPKHSDCLACLHFNHS GICELHCPALVTYNTDTFESMPNPEGRYTFGASCVTACPYNYLSTDVGSCTLVCPLHNQEVTAEDG TQRCEKCSKPCAR corresponding to amino acids 1-340 of Q9UK79_HUMAN (SEQ ID NO:534), which also corresponds to amino acids 1-340 of S57296_{—}1_P85 (SEQ ID NO:544), and a second amino acid sequence being at least 70%, optionally at least 80%, preferably at least 85%, more preferably at least 90% and most preferably at least 95% homologous to a polypeptide having the sequence VCYGLGMEHLREVRAVTSANIQEFAGCKKIFGSLAFLPESFDGVSLCQQAGVQWYDLGSLQPLPP GFKQFSCLSLLSSWDYRDPASNTAPLQPEQLQVFETLEEITGYLYISAWPDSLPDLSVFQNLQVIRG RILHNGAYSLTLQGLGISWLGLRSLRELGSGLALIHHNTHLCFVHTVPWDQLFRNPHQALLHTANR PEDECGKTGSPVCALPICQHTAVPRGPWQQRSWTCADCPSLCTLLDSAQLWLAWPLGMASLAGS YLPWHPSLPLCF (SEQ ID NO: 676) corresponding to amino acids 341-614 of S57296_{—}1_P85 (SEQ ID NO:544), wherein said first amino acid sequence and second amino acid sequence are contiguous and in a sequential order.

[1897] B. An isolated polypeptide encoding for an edge portion of S57296_{—}1_P85 (SEQ ID NO:544), comprising an amino acid sequence being at least 70%, optionally at least about 80%, preferably at least about 85%, more preferably at least about 90% and most preferably at least about 95% homologous to the sequence

(SEQ ID NO:544)

VCYGLGMEHLREVRAVTSANIQEFAGCKKIFGSLAFLPESFDGVSLCQQA
GVQWYDLGSLQPLPPGFKQFSCLSLLSSWDYRDPASNTAPLQPEQLQVFE
TLEEITGYLYISAWPDSLPDLSVFQNLQVIRGRILHNGAYSLTLQGLGIS
WLGLRSLRELGSGLALIHHNTHLCFVHTVPWDQLFRNPHQALLHTANRPE
DECGKTGSPVCALPICQHTAVPRGPWQQRSWTCADCPSLCTLLDSAQLWL
AWPLGMASLAGSYLPWHPSLPLCF (SEQ ID NO: 676) of
S57296_1_P85.

[1898] The location of the variant protein was determined according to results from a number of different software programs and analyses, including analyses from SignalP and other specialized programs. The variant protein is believed to be located as follows with regard to the cell: secreted. The protein localization is believed to be secreted because both signal-peptide prediction programs predict that this protein has a signal peptide, and neither trans-membrane region prediction program predicts that this protein has a trans-membrane region.

[1899] Variant protein S57296_{—}1_P85 (SEQ ID NO:544) also has the following non-silent SNPs (Single Nucleotide Polymorphisms) as listed in Table 214, (given according to their position(s) on the amino acid sequence, with the alternative amino acid(s) listed; the last column indicates whether the SNP is known or not; the presence of known SNPs in variant protein S57296_{—}1_P85 (SEQ ID NO:544) sequence provides support for the deduced sequence of this variant protein according to the present invention).

TABLE 214
Amino acid mutations

| SNP position(s) on amino acid | Alternative | |
|---|---|---|
| sequence | amino acid(s) | Previously known SNP? |
| 3 | A -> T | No |
| 105 | Q -> * | No |
| 112 | A -> V | No |
| 131 | A -> G | No |
| 327 | T -> A | No |
| 369 | I -> N | No |
| 465 | N -> D | No |
| 490 | W -> C | Yes |

[1900] The variant protein has the following domains, as determined by using InterPro. The domains are described in Table 215:

TABLE 215
InterPro domain(s)

| | | Position(s) |
|---|---|---|
| Domain description | Analysis type | on protein |
| Furin-like cysteine rich region | HMMPfam | 189-343 |
| Epidermal growth-factor receptor | HMMPfam | 52-173, 426-525 |
| (EGFR), L domain | | |
| Furin-like repeat | HMMSmart | 232-275 |
| Placeholder for matches with an | Seg | 3-21, 492-506 |
| unknown IPR | | |

[1901] Variant protein S57296_{—}1_P85 (SEQ ID NO:544) is encoded by the following transcript(s): S57296_{—}1_T79 (SEQ ID NO:482). The coding portion of transcript S57296_{—}1_T79 (SEQ ID NO:482) starts at position 238 and ends at position 2079. The transcript also has the following SNPs as listed in Table 216 (given according to their position on the nucleotide sequence, with the alternative nucleic acid listed; the last column indicates whether the SNP is known or not; the presence of known SNPs in variant protein S57296_{—}1_P85 (SEQ ID NO:544) sequence provides support for the deduced sequence of this variant protein according to the present invention).

TABLE 216
Nucleic acid SNPs

| SNP position on | | |
|---|---|---|
| nucleotide sequence | Alternative nucleic acid | Previously known SNP? |
| 155 | -> T | No |
| 160 | C -> T | No |
| 246 | G -> A | No |
| 335 | G -> A | Yes |
| 552 | C -> T | No |
| 574 | C -> T | No |
| 617 | C -> G | Yes |
| 631 | C -> G | No |
| 764 | C -> T | No |
| 1218 | A -> G | No |
| 1345 | T -> A | No |
| 1511 | C -> T | No |
| 1535 | A -> G | No |
| 1632 | A -> G | No |
| 1679 | G -> T | Yes |
| 1709 | G -> T | Yes |
| 1724 | A -> G | Yes |

[1902] Variant protein S57296_{—}1_P97 (SEQ ID NO:545) according to the present invention has an amino acid sequence; it is encoded by transcript(s) S57296_{—}1_T80 (SEQ ID NO:483). An alignment is given to the known protein (Herstatin (SEQ ID NO:534)). One or more alignments to one or more previously published protein sequences are in the alignment table located on the attached CDROM.

### Comparison Report Between S57296_{—}1_P97 (SEQ ID NO:545) and Q9UK79_HUMAN (SEQ ID NO:534):

[1903] A. An isolated chimeric polypeptide encoding for S57296_{—}1_P97 (SEQ ID NO:545), comprising a first amino acid sequence being at least 90% homologous to MELAALCRWGLLLALLPPGAASTQVCTGTDMKLRLPASPETHLDMLRHLYQGCQVVQGNLELTY LPTNASLSFLQDIQEVQGYVLIAHNQVRQVPLQRLRIVRGTQLFEDNYALAVLDNGDPLNNTTPVT GASPGGLRELQLRSLTEILKGGVLIQRNPQLCYQDTILWKDIFHKNNQLALTLIDTNRSRACHPCSP MCKGSRCWGESSEDCQSLTRTVCAGGCARCKGPLPTDCCHEQCAAGCTGPKHSDCLACLHFNHS GICELHCPALVTYNTDTFESMPNPEGRYTFGASCVTACPYNYLSTDVGSCTLVCPLHNQEVTAEDG TQRCEKCSKPCARGT corresponding to amino acids 1-342 of Q9UK79_HUMAN (SEQ ID NO:534), which also corresponds to amino acids 1-342 of S57296_{—}1_P97 (SEQ ID NO:545), and a second amino acid sequence being at least 70%, optionally at least 80%, preferably at least 85%, more preferably at least 90% and most preferably at least 95% homologous to a polypeptide having the sequence QPPTLPRSSQSSSKCLRLWKRSQVTYTSQHGRTACLTSASSRTCK (SEQ ID NO: 677) corresponding to amino acids 343-387 of S57296_{—}1_P97 (SEQ ID NO:545), wherein said first amino acid sequence and second amino acid sequence are contiguous and in a sequential order.

[1904] B. An isolated polypeptide encoding for an edge portion of S57296_{—}1_P97 (SEQ ID NO:545), comprising an amino acid sequence being at least 70%, optionally at least about 80%, preferably at least about 85%, more preferably at least about 90% and most preferably at least about 95% homologous to the sequence QPPTLPRSSQSSSKCLRLWKRSQVTYTSQHGRTACLTSASSRTCK (SEQ ID NO: 677) of S57296_{—}1_P97 (SEQ ID NO:545).

[1905] The location of the variant protein was determined according to results from a number of different software programs and analyses, including analyses from SignalP and other specialized programs. The variant protein is believed to be located as follows with regard to the cell: secreted. The protein localization is believed to be secreted because both signal-peptide prediction programs predict that this protein has a signal peptide, and neither trans-membrane region prediction program predicts that this protein has a trans-membrane region.

[1906] Variant protein S57296_{—}1_P97 (SEQ ID NO:545) also has the following non-silent SNPs (Single Nucleotide Polymorphisms) as listed in Table 217, (given according to their position(s) on the amino acid sequence, with the alternative amino acid(s) listed; the last column indicates whether the SNP is known or not; the presence of known SNPs in variant protein S57296_{—}1_P97 (SEQ ID NO:545) sequence provides support for the deduced sequence of this variant protein according to the present invention).

TABLE 217
Amino acid mutations

| SNP position(s) on | Alternative | Previously |
|---|---|---|
| amino acid sequence | amino acid(s) | known SNP? |
| 3 | A -> T | No |
| 105 | Q -> * | No |
| 112 | A -> V | No |
| 131 | A -> G | No |
| 327 | T -> A | No |
| 343 | P -> L | No |
| 351 | Q -> R | No |

[1907] The variant protein has the following domains, as determined by using InterPro. The domains are described in Table 218:

TABLE 218
InterPro domain(s)

| | | Position(s) |
|---|---|---|
| Domain description | Analysis type | on protein |
| Furin-like cysteine rich region | HMMPfam | 189-340 |
| Epidermal growth-factor receptor | HMMPfam | 52-173 |
| (EGFR), L domain | | |
| Furin-like repeat | HMMSmart | 232-275 |
| Placeholder for matches with an | Seg | 3-21 |
| unknown IPR | | |

[1908] Variant protein S57296_{—}1_P97 (SEQ ID NO:545) is encoded by the following transcript(s): S57296_{—}1_T80 (SEQ ID NO:483). The coding portion of transcript S57296_{—}1_T80 (SEQ ID NO:483) starts at position 238 and ends at position 1398. The transcript also has the following SNPs as listed in Table 219 (given according to their position on the nucleotide sequence, with the alternative nucleic acid listed; the last column indicates whether the SNP is known or not; the presence of known SNPs in variant protein S57296_{—}1_P97 (SEQ ID NO:545) sequence provides support for the deduced sequence of this variant protein according to the present invention).

TABLE 219
Nucleic acid SNPs

| SNP position on | | |
|---|---|---|
| nucleotide sequence | Alternative nucleic acid | Previously known SNP? |
| 155 | -> T | No |
| 160 | C -> T | No |
| 246 | G -> A | No |
| 335 | G -> A | Yes |
| 552 | C -> T | No |
| 574 | C -> T | No |
| 617 | C -> G | Yes |
| 631 | C -> G | No |
| 764 | C -> T | No |
| 1218 | A -> G | No |
| 1267 | C -> T | No |
| 1291 | A -> G | No |
| 1388 | A -> G | No |

[1909] Variant protein S57296_{—}1_P125 (SEQ ID NO:546) according to the present invention has an amino acid sequence; it is encoded by transcript(s) S57296_{—}1_T75 (SEQ ID NO:478). An alignment is given to the known protein (Herstatin (SEQ ID NO:534)). One or more alignments to one or more previously published protein sequences in the alignment table located on the attached CDROM.

### 1. Comparison Report Between S57296_{—}1_P125 (SEQ ID NO:546) and ERB2_HUMAN (SEQ ID NO:538):

[1910] A. An isolated chimeric polypeptide encoding for S57296_{—}1_P125 (SEQ ID NO:546), comprising a first amino acid sequence being at least 90% homologous to MELAALCRWGLLLALLPPGAASTQVCTGTDMKLRLPASPETHLDMLRHLYQGCQVVQGNLELTY LPTNASLSFLQDIQEVQGYVLIAHNQVRQVPLQRLRIVRGTQLFEDNYALAVLDNGDPLNNTTPVT GASPGGLRELQLRSLTEILKGGVLIQRNPQLCYQDTILWKDIFHKNNQLALTLIDTNRSRACHPCSP MCKGSRCWGESSEDCQSLTRTVCAGGCARCKGPLPTDCCHEQCAAGCTGPKHSDCLACLHFNHS GICELHCPALVTYNTDTFESMPNPEGRYTFGASCVTACPYNYLSTDVGSCTLVCPLHNQEVTAEDG TQRCEKCSKPCARVCYGLGMEHLREVRAVTSANIQEFAGCKKIFGSLAFLPESFDGDPASNTAPLQ PEQLQVFETLEEITGYLYISAWPDSLPDLSVFQNLQVIRGRILHNGAYSLTLQGLGISWLGLRSLREL GSGLALIHHNTHLCFVHTVPWDQLFRNPHQALLHTANRPEDECVGEGLACHQLCARGHCWGPGP TQCVNCSQFLRGQECVEECRVLQGLPREYVNARHCLPCHPECQPQNGSVTCFGPEADQCVACAH YKDPPFCVARCPSGVKPDLSYMPIWKFPDEEGACQPCPINCTHSCVDLDDKGCPAEQRA corresponding to amino acids 1-648 of ERB2_HUMAN (SEQ ID NO:538), which also corresponds to amino acids 1-648 of S57296_{—}1_P125 (SEQ ID NO:546), and a second amino acid sequence being at least 70%, optionally at least 80%, preferably at least 85%, more preferably at least 90% and most preferably at least 95% homologous to a polypeptide having the sequence RLAWTPGCTLHCPSLPHWMLGGHCCREGTP (SEQ ID NO: 678) corresponding to amino acids 649-678 of S57296_{—}1_P125 (SEQ ID NO:546), wherein said first amino acid sequence and second amino acid sequence are contiguous and in a sequential order.

[1911] B. An isolated polypeptide encoding for an edge portion of S57296_{—}1_P125 (SEQ ID NO:546), comprising an amino acid sequence being at least 70%, optionally at least about 80%, preferably at least about 85%, more preferably at least about 90% and most preferably at least about 95% homologous to the sequence RLAWTPGCTLHCPSLPHWMLGGHCCREGTP (SEQ ID NO: 678) of S57296_{—}1_P125 (SEQ ID NO:546).

### 2. Comparison Report Between S57296_{—}1_P125 (SEQ ID NO:546) and NP_{—}004439 (SEQ ID NO:540):

[1912] A. An isolated chimeric polypeptide encoding for S57296_{—}1_P125 (SEQ ID NO:546), comprising a first amino acid sequence being at least 90% homologous to MELAALCRWGLLLALLPPGAASTQVCTGTDMKLRLPASPETHLDMLRHLYQGCQVVQGNLELTY LPTNASLSFLQDIQEVQGYVLIAHNQVRQVPLQRLRIVRGTQLFEDNYALAVLDNGDPLNNTTPVT GASPGGLRELQLRSLTEILKGGVLIQRNPQLCYQDTILWKDIFHKNNQLALTLIDTNRSRACHPCSP MCKGSRCWGESSEDCQSLTRTVCAGGCARCKGPLPTDCCHEQCAAGCTGPKHSDCLACLHFNHS GICELHCPALVTYNTDTFESMPNPEGRYTFGASCVTACPYNYLSTDVGSCTLVCPLHNQEVTAEDG TQRCEKCSKPCARVCYGLGMEHLREVRAVTSANIQEFAGCKKIFGSLAFLPESFDGDPASNTAPLQ PEQLQVFETLEEITGYLYISAWPDSLPDLSVFQNLQVIRGRILHNGAYSLTLQGLGISWLGLRSLREL GSGLALIHHNTHLCFVHTVPWDQLFRNPHQALLHTANRPEDECVGEGLACHQLCARGHCWGPGP TQCVNCSQFLRGQECVEECRVLQGLPREYVNARHCLPCHPECQPQNGSVTCFGPEADQCVACAH YKDPPFCVARCPSGVKPDLSYMPIWKFPDEEGACQPCPINCTHSCVDLDDKGCPAEQRA corresponding to amino acids 1-648 of NP_{—}004439 (SEQ ID NO:540), which also corresponds to amino acids 1-648 of S57296_{—}1_P125 (SEQ ID NO:546), and a second amino acid sequence being at least 70%, optionally at least 80%, preferably at least 85%, more preferably at least 90% and most preferably at least 95% homologous to a polypeptide having the sequence RLAWTPGCTLHCPSLPHWMLGGHCCREGTP (SEQ ID NO: 678) corresponding to amino acids 649-678 of S57296_{—}1_P125 (SEQ ID NO:546), wherein said first amino acid sequence and second amino acid sequence are contiguous and in a sequential order.

[1913] B. An isolated polypeptide encoding for an edge portion of S57296_{—}1_P125 (SEQ ID NO:546), comprising an amino acid sequence being at least 70%, optionally at least about 80%, preferably at least about 85%, more preferably at least about 90% and most preferably at least about 95% homologous to the sequence RLAWTPGCTLHCPSLPHWMLGGHCCREGTP (SEQ ID NO: 678) of S57296_{—}1_P125 (SEQ ID NO:546).

### 3. Comparison Report Between S57296_{—}1_P125 (SEQ ID NO:546) and NP_{—}001005862 (SEQ ID NO:539):

[1914] A. An isolated chimeric polypeptide encoding for S57296_{—}1_P125 (SEQ ID NO:546), comprising a first amino acid sequence being at least 70%, optionally at least 80%, preferably at least 85%, more preferably at least 90% and most preferably at least 95%, homologous to a polypeptide having the sequence MELAALCRWGLLLALLPPGAASTQVCTGTD (SEQ ID NO: 673) corresponding to amino acids 1-30 of S57296_{—}1_P125 (SEQ ID NO:546), a second amino acid sequence being at least 70%, optionally at least 80%, preferably at least 85%, more preferably at least 90% and most preferably at least 95%, homologous to a polypeptide having the sequence MKLRLPASPETHLDMLRHLYQGCQVVQGNLELTYLPTNASLSFLQDIQEVQGYVLIAHNQVRQVP LQRLRIVRGTQLFEDNYALAVLDNGDPLNNTTPVTGASPGGLRELQLRSLTEILKGGVLIQRNPQL CYQDTILWKDIFHKNNQLALTLIDTNRSRACHPCSPMCKGSRCWGESSEDCQSLTRTVCAGGCAR CKGPLPTDCCHEQCAAGCTGPKHSDCLACLHFNHSGICELHCPALVTYNTDTFESMPNPEGRYTFG ASCVTACPYNYLSTDVGSCTLVCPLHNQEVTAEDGTQRCEKCSKPCARVCYGLGMEHLREVRAV TSANIQEFAGCKKIFGSLAFLPESFDGDPASNTAPLQPEQLQVFETLEEITGYLYISAWPDSLPDLSV FQNLQVIRGRILHNGAYSLTLQGLGISWLGLRSLRELGSGLALIHHNTHLCFVHTVPWDQLFRNPH QALLHTANRPEDECVGEGLACHQLCARGHCWGPGPTQCVNCSQFLRGQECVEECRVLQGLPREY VNARHCLPCHPECQPQNGSVTCFGPEADQCVACAHYKDPPFCVARCPSGVKPDLSYMPIWKFPDE EGACQPCPINCTHSCVDLDDKGCPAEQRARLAWTPGCTLHCPSLPHWM corresponding to amino acids 649-678 of S57296_{—}1_P125 (SEQ ID NO:546), and a third amino acid sequence being at least 90% homologous to SPLTSIISAVVGILLVVVLGVVFGILIKRRQQKIRKYTMRRLLQETELVEPLTPSGAMPNQAQMRILK ETELRKVKVLGSGAFGTVYKGIWIPDGENVKIPVAIKVLRENTSPKANKEILDEAYVMAGVGSPYV SRLLGICLTSTVQLVTQLMPYGCLLDHVRENRGRLGSQDLLNWCMQIAKGMSYLEDVRLVHRDL AARNVLVKSPNHVKITDFGLARLLDIDETEYHADGGKVPIKWMALESILRRRFTHQSDVWSYGVT VWELMTFGAKPYDGIPAREIPDLLEKGERLPQPPICTIDVYMIMVKCWMIDSECRPRFRELVSEFSR MARDPQRFVVIQNEDLGPASPLDSTFYRSLLEDDDMGDLVDAEEYLVPQQGFFCPDPAPGAGGM VHHRHRSSSTRSGGGDLTLGLEPSEEEAPRSPLAPSEGAGSDVFDGDLGMGAAKGLQSLPTHDPSP LQRYSEDPTVPLPSETDGYVAPLTCSPQPEYVNQPDVRPQPPSPREGPLPAARPAGATLERPKTLSP GKNGVVKDVFAFGGAVENPEYLTPQGGAAPQPHPPPAFSPAFDNLYYWDQDPPERGAPPSTFKGT PTAENPEYLGLDVPV corresponding to amino acids 1-618 of NP_{—}001005862 (SEQ ID NO:539), which also corresponds to amino acids 31-648 of S57296_{—}1_P125 (SEQ ID NO:546), wherein said first amino acid sequence, second amino acid sequence and third amino acid sequence are contiguous and in a sequential order.

[1915] B. An isolated polypeptide encoding for a head of S57296_{—}1_P125 (SEQ ID NO:546), comprising a polypeptide being at least 70%, optionally at least about 80%, preferably at least about 85%, more preferably at least about 90% and most preferably at least about 95% homologous to the sequence MELAALCRWGLLLALLPPGAASTQVCTGTD (SEQ ID NO: 673) of S57296_{—}1_P125 (SEQ ID NO:546).

### 4. Comparison Report Between S57296_{—}1_P125 (SEQ ID NO:546) and Q9UK79_HUMAN (SEQ ID NO:534):

[1916] A. An isolated chimeric polypeptide encoding for S57296_{—}1_P125 (SEQ ID NO:546), comprising a first amino acid sequence being at least 90% homologous to MELAALCRWGLLLALLPPGAASTQVCTGTDMKLRLPASPETHLDMLRHLYQGCQVVQGNLELTY LPTNASLSFLQDIQEVQGYVLIAHNQVRQVPLQRLRIVRGTQLFEDNYALAVLDNGDPLNNTTPVT GASPGGLRELQLRSLTEILKGGVLIQRNPQLCYQDTILWKDIFHKNNQLALTLIDTNRSRACHPCSP MCKGSRCWGESSEDCQSLTRTVCAGGCARCKGPLPTDCCHEQCAAGCTGPKHSDCLACLHFNHS GICELHCPALVTYNTDTFESMPNPEGRYTFGASCVTACPYNYLSTDVGSCTLVCPLHNQEVTAEDG TQRCEKCSKPCAR corresponding to amino acids 1-340 of Q9UK79_HUMAN (SEQ ID NO:534), which also corresponds to amino acids 1-340 of S57296_{—}1_P125 (SEQ ID NO:546), and a second amino acid sequence being at least 70%, optionally at least 80%, preferably at least 85%, more preferably at least 90% and most preferably at least 95% homologous to a polypeptide having the sequence VCYGLGMEHLREVRAVTSANIQEFAGCKKIFGSLAFLPESFDGDPASNTAPLQPEQLQVFETLEEIT GYLYISAWPDSLPDLSVFQNLQVIRGRILHNGAYSLTLQGLGISWLGLRSLRELGSGLALIHHNTHL CFVHTVPWDQLFRNPHQALLHTANRPEDECVGEGLACHQLCARGHCWGPGPTQCVNCSQFLRGQ ECVEECRVLQGLPREYVNARHCLPCHPECQPQNGSVTCFGPEADQCVACAHYKDPPFCVARCPSG VKPDLSYMPIWKFPDEEGACQPCPINCTHSCVDLDDKGCPAEQRARLAWTPGCTLHCPSLPHWML GGHCCREGTP corresponding to amino acids 341-678 of S57296_{—}1_P125 (SEQ ID NO:546), wherein said first amino acid sequence and second amino acid sequence are contiguous and in a sequential order.

[1917] B. An isolated polypeptide encoding for an edge portion of S57296_{—}1_P125 (SEQ ID NO:546), comprising an amino acid sequence being at least 70%, optionally at least about 80%, preferably at least about 85%, more preferably at least about 90% and most preferably at least about 95% homologous to the sequence

| | |
|---|---|
| VCYGLGMEHLREVRAVTSANIQEFAGCKKIFGSLAFLPESFDGDPASNTAPLQPEQLQVFETLEEIT | (SEQ ID NO: 680) |
| GYLYISAWPDSLPDLSVFQNLQVIRGRILHNGAYSLTLQGLGISWLGLRSLRELGSGLALIHHNTHL | of S57296_1_P125 |
| CFVHTVPWDQLFRNPHQALLHTANRPEDECVGEGLACHQLCARGHCWGPGPTQCVNCSQFLRGQ | (SEQ ID NO: 546) |
| ECVEECRVLQGLPREYVNARHCLPCHPECQPQNGSVTCFGPEADQCVACAHYKDPPFCVARCPSG | |
| VKPDLSYMPIWKFPDEEGACQPCPINCTHSCVDLDDKGCPAEQRARLAWTPGCTLHCPSLPHWML | |
| GGHCCREGTP. | |

[1918] The location of the variant protein was determined according to results from a number of different software programs and analyses, including analyses from SignalP and other specialized programs. The variant protein is believed to be located as follows with regard to the cell: secreted. The protein localization is believed to be secreted because both signal-peptide prediction programs predict that this protein has a signal peptide, and neither trans-membrane region prediction program predicts that this protein has a trans-membrane region.

[1919] Variant protein S57296_{—}1_P125 (SEQ ID NO:546) also has the following non-silent SNPs (Single Nucleotide Polymorphisms) as listed in Table 220, (given according to their position(s) on the amino acid sequence, with the alternative amino acid(s) listed; the last column indicates whether the SNP is known or not; the presence of known SNPs in variant protein S57296_{—}1_P125 (SEQ ID NO:546) sequence provides support for the deduced sequence of this variant protein according to the present invention).

TABLE 220
Amino acid mutations

| SNP position(s) on | | |
|---|---|---|
| amino acid sequence | Alternative amino acid(s) | Previously known SNP? |
| 3 | A -> T | No |
| 105 | Q -> * | No |
| 112 | A -> V | No |
| 131 | A -> G | No |
| 327 | T -> A | No |
| 369 | I -> N | No |
| 426 | N -> D | No |
| 451 | W -> C | Yes |

[1920] The variant protein has the following domains, as determined by using InterPro. The domains are described in Table 221:

TABLE 221
InterPro domain(s)

| Domain description | Analysis type | Position(s) on protein |
|---|---|---|
| 4Fe-4S ferredoxin, iron-sulfur | FPrintScan | 577-588, 595-606 |
| binding | | |
| Furin-like cysteine rich region | HMMPfam | 189-343 |
| Epidermal growth-factor | HMMPfam | 52-173, 366-486 |
| receptor (EGFR), L domain | | |
| Furin-like repeat | HMMSmart | 232-275, 501-552, |
| | | 557-606 |
| Placeholder for matches with an | Seg | 3-21, 453-467 |
| unknown IPR | | |

[1921] Variant protein S57296_{—}1_P125 (SEQ ID NO:546) is encoded by the following transcript(s): S57296_{—}1_T75 (SEQ ID NO:478). The coding portion of transcript S57296_{—}1_T75 (SEQ ID NO:478) starts at position 238 and ends at position 2271. The transcript also has the following SNPs as listed in Table 222 (given according to their position on the nucleotide sequence, with the alternative nucleic acid listed; the last column indicates whether the SNP is known or not; the presence of known SNPs in variant protein S57296_{—}1_P125 (SEQ ID NO:546) sequence provides support for the deduced sequence of this variant protein according to the present invention).

TABLE 222
Nucleic acid SNPs

| SNP position on | | |
|---|---|---|
| nucleotide sequence | Alternative nucleic acid | Previously known SNP? |
| 155 | -> T | No |
| 160 | C -> T | No |
| 246 | G -> A | No |
| 335 | G -> A | Yes |
| 552 | C -> T | No |
| 574 | C -> T | No |
| 617 | C -> G | Yes |
| 631 | C -> G | No |
| 764 | C -> T | No |
| 1218 | A -> G | No |
| 1345 | T -> A | No |
| 1394 | C -> T | No |
| 1418 | A -> G | No |
| 1515 | A -> G | No |
| 1562 | G -> T | Yes |
| 1592 | G -> T | Yes |
| 1607 | A -> G | Yes |
| 1814 | C -> T | No |
| 1922 | G -> A | Yes |
| 2274 | C -> G | Yes |
| 2281 | C -> G | Yes |
| 2474 | G -> C | Yes |

[1922] Variant protein S57296_{—}1_P127 (SEQ ID NO:547) according to the present invention has an amino acid sequence; it is encoded by transcript(s) S57296_{—}1_T76 (SEQ ID NO:479). An alignment is given to the known protein (Herstatin (SEQ ID NO:534)). One or more alignments to one or more previously published protein sequences are given in the alignment table located on the attached CDROM.

[1923] The location of the variant protein was determined according to results from a number of different software programs and analyses, including analyses from SignalP and other specialized programs. The variant protein is believed to be located as follows with regard to the cell: secreted. The protein localization is believed to be secreted because both signal-peptide prediction programs predict that this protein has a signal peptide, and neither trans-membrane region prediction program predicts that this protein has a trans-membrane region.

[1924] Variant protein S57296_{—}1_P127 (SEQ ID NO:547) also has the following non-silent SNPs (Single Nucleotide Polymorphisms) as listed in Table 223, (given according to their position(s) on the amino acid sequence, with the alternative amino acid(s) listed; the last column indicates whether the SNP is known or not; the presence of known SNPs in variant protein S57296_{—}1_P127 (SEQ ID NO:547) sequence provides support for the deduced sequence of this variant protein according to the present invention).

TABLE 223
Amino acid mutations

| SNP position(s) on | | |
|---|---|---|
| amino acid sequence | Alternative amino acid(s) | Previously known SNP? |
| 3 | A -> T | No |
| 105 | Q -> * | No |
| 112 | A -> V | No |
| 131 | A -> G | No |
| 327 | T -> A | No |
| 369 | I -> N | No |
| 465 | N -> D | No |
| 490 | W -> C | Yes |

[1925] The variant protein has the following domains, as determined by using InterPro. The domains are described in Table 224:

TABLE 224
InterPro domain(s)

| Domain description | Analysis type | Position(s) on protein |
|---|---|---|
| 4Fe-4S ferredoxin, iron-sulfur | FPrintScan | 616-627, 634-645 |
| binding | | |
| Furin-like cysteine rich region | HMMPfam | 189-343 |
| Epidermal growth-factor | HMMPfam | 52-173, 426-525 |
| receptor (EGFR), L domain | | |
| Furin-like repeat | HMMSmart | 232-275, 540-591, |
| | | 596-645 |
| Placeholder for matches with an | Seg | 3-21, 492-506 |
| unknown IPR | | |

[1926] Variant protein S57296_{—}1_P127 (SEQ ID NO:547) is encoded by the following transcript(s): S57296_{—}1_T76 (SEQ ID NO:479). The coding portion of transcript S57296_{—}1_T76 (SEQ ID NO:479) starts at position 238 and ends at position 2388. The transcript also has the following SNPs as listed in Table 225 (given according to their position on the nucleotide sequence, with the alternative nucleic acid listed; the last column indicates whether the SNP is known or not; the presence of known SNPs in variant protein S57296_{—}1_P127 (SEQ ID NO:547) sequence provides support for the deduced sequence of this variant protein according to the present invention).

TABLE 225
Nucleic acid SNPs

| SNP position on | | |
|---|---|---|
| nucleotide sequence | Alternative nucleic acid | Previously known SNP? |
| 155 | -> T | No |
| 160 | C -> T | No |
| 246 | G -> A | No |
| 335 | G -> A | Yes |
| 552 | C -> T | No |
| 574 | C -> T | No |
| 617 | C -> G | Yes |
| 631 | C -> G | No |
| 764 | C -> T | No |
| 1218 | A -> G | No |
| 1345 | T -> A | No |
| 1511 | C -> T | No |
| 1535 | A -> G | No |
| 1632 | A -> G | No |
| 1679 | G -> T | Yes |
| 1709 | G -> T | Yes |
| 1724 | A -> G | Yes |
| 1931 | C -> T | No |
| 2039 | G -> A | Yes |
| 2391 | C -> G | Yes |
| 2398 | C -> G | Yes |
| 2591 | G -> C | Yes |

[1927] Table 226 below describes the starting and ending position of S57296_{—}1_N59 (SEQ ID NO:495) on each of the relevant transcripts. Experimental results for this segment are described below.

TABLE 226
Segment location on transcripts

| | Segment | Segment |
|---|---|---|
| Transcript name | starting position | ending position |
| S57296_1_T75 (SEQ ID NO: 478) | 2184 | 2637 |
| S57296_1_T76 (SEQ ID NO: 479) | 2301 | 2747 |

[1928] Table 227 below describes the starting and ending position of S57296_{—}1_N58 (SEQ ID NO:510) on each of the relevant transcripts. Experimental results for this segment are described below.

TABLE 227
Segment location on transcripts

| | Segment | Segment |
|---|---|---|
| Transcript name | starting position | ending position |
| S57296_1_T75 (SEQ ID NO: 478) | 2136 | 2183 |
| S57296_1_T76 (SEQ ID NO: 479) | 2253 | 2300 |
| S57296_1_T78 (SEQ ID NO: 481) | 2253 | 2300 |

[1929] Table 228 below describes the starting and ending position of S57296_{—}1_N63 (SEQ ID NO:511) on the relevant transcript. Experimental results for this segment are described below.

TABLE 228
Segment location on transcripts

| | Segment | Segment |
|---|---|---|
| Transcript name | starting position | ending position |
| S57296_1_T78 (SEQ ID NO: 481) | 2440 | 2520 |

[1930] The starting and ending positions of S57296_{—}1_N46 (SEQ ID NO:552) on transcript S57296_{—}1_T77 (SEQ ID NO: 480) are 1751 and 2031 respectively.

[1931] The starting and ending positions of S57296_{—}1_N46 (SEQ ID NO:552) on transcript S57296_{—}1_T79 (SEQ ID NO:482) are 1868 and 2148 respectively.

Expression of Homo sapiens v-erb-b2 erythroblastic leukemia viral oncogene homolog 2, neuro/glioblastoma derived oncogene homolog (avian) (ERBB2) S57296 transcripts which are detectable by amplicon as depicted in sequence name S57296-B2Lnew seg58-59 (SEQ ID NO: 550) in normal and cancerous breast tissues

[1932] Expression of Homo sapiens v-erb-b2 erythroblastic leukemia viral oncogene homolog 2, neuro/glioblastoma derived oncogene homolog (avian) (ERBB2) transcripts detectable by or according to seg58-59-by S57296-B2Lnew seg58-59 (SEQ ID NO: 550) amplicon and primers S57296 seg58-59F (SEQ ID NO: 548) and S57296 seg58-59R (SEQ ID NO: 549) was measured by real time PCR. In parallel the expression of four housekeeping genes—PBGD (GenBank Accession No. BC019323 (SEQ ID NO:6); amplicon—PBGD-amplicon (SEQ ID NO:32)), HPRT1 (GenBank Accession No. NM_{—}000194 (SEQ ID NO:5); amplicon—HPRT1-amplicon (SEQ ID NO:35)), SDHA (GenBank Accession No. NM_{—}004168 (SEQ ID NO:4); amplicon—SDHA-amplicon (SEQ ID NO:29)) and G6PD (GenBank Accession No. NM_{—}000402 (SEQ ID NO:8); G6PD amplicon (SEQ ID NO: 44)) was measured similarly. For each RT sample, the expression of the above amplicon was normalized to the geometric mean of the quantities of the housekeeping genes. The normalized quantity of each RT sample was then divided by the median of the quantities of the normal post-mortem (PM) and post surgery (PS) samples (Sample Nos. 56-60, 63-67, Table 6, “Tissue samples in breast cancer testing panel” above), to obtain a value of fold up-regulation for each sample relative to median of the normal PM samples.

[1933] FIG. 78 is a histogram showing over expression of the above-indicated Homo sapiens v-erb-b2 erythroblastic leukemia viral oncogene homolog 2, neuro/glioblastoma derived oncogene homolog (avian) (ERBB2) transcripts in cancerous breast samples relative to the normal samples. Values represent the average of duplicate experiments. Error bars indicate the minimal and maximal values obtained.

[1934] As is evident from FIG. 78, the expression of Homo sapiens v-erb-b2 erythroblastic leukemia viral oncogene homolog 2, neuro/glioblastoma derived oncogene homolog (avian) (ERBB2) transcripts detectable by the above amplicon in cancer samples was significantly higher than in the non-cancerous samples (Sample Nos. 56-60, 63-67 Table 6, “Tissue samples in breast cancer testing panel” above). Notably an over-expression of at least 5 fold was found in 14 out of 28 adenocarcinoma samples.

[1935] Statistical analysis was applied to verify the significance of these results, as described below.

[1936] Threshold of 5 fold overexpression was found to differentiate between cancer and normal samples with P value of 2.82E-02 as checked by exact fisher test. The above value demonstrate statistical significance of the results.

[1937] By dissecting the patient's population into four age groups (indicated below the graph), we demonstrate that the transcripts detected by the above amplicon are highly expressed mainly in the 45-55 age group.

[1938] One of the normal samples (Sample No. 56, Table 5, “Tissue samples in breast cancer testing panel” above) showed high over-expression of all checked ErbB-2 transcripts. Since over-expression of ErbB-2 WT was observed in this sample, and also over-expression of hTERT which is known to be expressed only in cancerous cells (data not shown), it is thought that this sample is either contaminated with cancerous cells, or alternatively may have been marked by mistake as a normal sample.

[1939] The B2L variants were over expressed at least 5 fold also in 2 of the 5 matched normal samples. Since matched samples are histologically non-cancerous tissue that surrounds the tumor, such samples could have been contaminated with cancer or pre-cancer cells.

[1940] Primer pairs are also optionally and preferably encompassed within the present invention; for example, for the above experiment, the following primer pair was used as a non-limiting illustrative example only of a suitable primer pair: S57296 seg58-59F (SEQ ID NO: 548) forward primer; and S57296 seg58-59R (SEQ ID NO: 549) reverse primer.

[1941] The present invention also preferably encompasses any amplicon obtained through the use of any suitable primer pair; for example, for the above experiment, the following amplicon was obtained as a non-limiting illustrative example only of a suitable amplicon: S57296 seg58-59 (SEQ ID NO: 550).

[1942] Primers:

| | |
|---|---|
| Forward primer S57296 seg58-59F: | (SEQ ID NO: 548) |
| GACAAGGGCTGCCCCG | |
| Reverse primer S57296 seg58-59R: | (SEQ ID NO: 549) |
| CAGTGACCACCCAGCATCC | |
| Amplicon S57296-B2Lnew seg58-59: | (SEQ ID NO: 550) |

GACAAGGGCTGCCCCGCCGAGCAGAGAGCCAGGTTGGCCTGGACCCCAGGATGTACCCTTCA
TTGCCCTTCACTCCCCCACTGGATGCTGGGTGGTCACTG

Expression of Homo sapiens v-erb-b2 erythroblastic leukemia viral oncogene homolog 2, neuro/glioblastoma derived oncogene homolog (avian) (ERBB2) S57296 transcripts which are detectable by amplicon as depicted in sequence name S57296 B2S seg-44 (SEQ ID NO: 552), S57296 B2Lnew seg58-59 (SEQ ID NO: 550), S57296WT seg63 (SEQ ID NO:497) in normal and cancerous lung tissues

[1943] Expression of Homo sapiens v-erb-b2 erythroblastic leukemia viral oncogene homolog 2, neuro/glioblastoma derived oncogene homolog (avian) (ERBB2) transcripts detectable by or according to S57296 B2S seg-44 (SEQ ID NO: 552), S57296 B2Lnew seg58-59 (SEQ ID NO: 550), S57296WT seg63 (SEQ ID NO:497) amplicons and primers S57296 B2S seg-44F (SEQ ID NO: 551), seg58-59F (SEQ ID NO: 548), seg63F (SEQ ID NO: 555) and S57296 seg-44R, seg58-59R (SEQ ID NO: 549), seg63R (SEQ ID NO: 556) was measured by real time PCR. In parallel the expression of four housekeeping genes—PBGD (GenBank Accession No. BC019323 (SEQ ID NO:6); amplicon—PBGD-amplicon (SEQ ID NO:32)), HPRT1 (GenBank Accession No. NM_{—}000194 (SEQ ID NO:5); amplicon—HPRT1-amplicon (SEQ ID NO:35)), SDHA (GenBank Accession No. NM_{—}004168 (SEQ ID NO:4); amplicon—SDHA-amplicon (SEQ ID NO:29)) and Ubiquitin (GenBank Accession No. BC000449 (SEQ ID NO:9); amplicon—Ubiquitin-amplicon (SEQ ID NO:50)) was measured similarly. For each RT sample, the expression of the above amplicons was normalized to the geometric mean of the quantities of the housekeeping genes. For each amplicon, the normalized quantity of each RT sample was then divided by the median of the quantities of the normal post-mortem (PM) samples (Sample Nos. 47-50, 90-93, 96-99, Table 5, above, “Tissue samples in lung cancer testing panel”), to obtain a value of fold differential expression for each sample relative to median of the normal PM samples.

[1944] In one experiment that was carried out no differential expression in the cancerous samples relative to the normal PM samples was observed.

[1945] Primer pairs are also optionally and preferably encompassed within the present invention; for example, for the above experiment, the following primer pair was used as a non-limiting illustrative example only of a suitable primer pairs: S57296 B2S seg-44F (SEQ ID NO: 551), seg58-59F (SEQ ID NO: 548), seg63F (SEQ ID NO: 555) forward primers; and S57296 seg44R, seg58-59R (SEQ ID NO: 549), seg63R (SEQ ID NO: 556) reverse primers.

[1946] The present invention also preferably encompasses any amplicon obtained through the use of any suitable primer pair; for example, for the above experiment, the following amplicon was obtained as a non-limiting illustrative example only of a suitable amplicons: S57296 B2S seg-44 (SEQ ID NO: 552), S57296 B2Lnew seg58-59 (SEQ ID NO: 550), S57296WT seg63 (SEQ ID NO:497)

[1947] Primers:

| Forward primer S57296 B2S seg-44 F: | (SEQ ID NO: 551) |
|---|---|
| CAGCGTTCTTGGACTTGTGC | |
| Reverse primer S57296 B2S seg-44 R: | (SEQ ID NO: 671) |
| CCAGCTAGAGAAGCCATGCC | |
| Amplicon S57296 B2S seg-44: | (SEQ ID NO: 552) |
| CAGCGTTCTTGGACTTGTGCAGACTGCCCGTCTCTGTGCACCCTTCTTGACTCAGCACAGCTCT | |
| GGCTGGCTTGGCCTCTTGGCATGGCTTCTCTAGCTGG | |
| Forward primer S57296 seg58-59 F: | (SEQ ID NO: 548) |
| GACAAGGGCTGCCCCG | |
| Reverse primer S57296 seg58-59 R: | (SEQ ID NO: 549) |
| CAGTGACCACCCAGCATCC | |
| Amplicon S57296 seg58-59: | (SEQ ID NO: 550) |
| GACAAGGGCTGCCCCGCCGAGCAGAGAGCCAGGTTGGCCTGGACCCCAGGATGTACCCTTCA | |
| TTGCCCTTCACTCCCCCACTGGATGCTGGGTGGTCACTG | |
| Forward primer S57296-WT seg63 F: | (SEQ ID NO: 553) |
| CCCATATGTCTCCCGCCTT | |
| Reverse primer S57296-WT seg63 R: | (SEQ ID NO: 554) |
| ACATGGTCTAAGAGGCAGCCA | |
| Amplicon S57296 seg63: | (SEQ ID NO: 557) |

CCCATATGTCTCCCGCCTTCTGGGCATCTGCCTGACATCCACGGTGCAGCTGGTGACACAGCTT
ATGCCCTATGGCTGCCTCTTAGACCATGT

Expression of Homo sapiens v-erb-b2 erythroblastic leukemia viral oncogene homolog 2, neuro/glioblastoma derived oncogene homolog (avian) (ERBB2) S57296 transcripts which are detectable by amplicon as depicted in sequence name S57296 B2S seg-44 (SEQ ID NO: 552), S57296 B2Lnew seg58-59 (SEQ ID NO: 550), S57296WT seg63 (SEQ ID NO:497) in different normal tissues:

[1948] Expression of Homo sapiens v-erb-b2 erythroblastic leukemia viral oncogene homolog 2, neuro/glioblastoma derived oncogene homolog (avian) (ERBB2) transcripts detectable by or according to S57296 B2S seg-44 (SEQ ID NO: 552), S57296 B2Lnew seg58-59 (SEQ ID NO: 550), S57296WT seg63 (SEQ ID NO:497) amplicons and primers: S57296 B2S seg-44F (SEQ ID NO: 551), seg58-59F (SEQ ID NO: 548), seg63F (SEQ ID NO: 555) and S57296 seg44R, seg58-59R (SEQ ID NO: 549), seg63R (SEQ ID NO: 556) was measured by real time PCR. In parallel the expression of four housekeeping genes—RPL19 (GenBank Accession No. NM_{—}000981 (SEQ ID NO:7); RPL19 amplicon (SEQ ID NO: 38)), TATA box (GenBank Accession No. NM_{—}003194 (SEQ ID NO:2); TATA amplicon (SEQ ID NO: 53)), Ubiquitin (GenBank Accession No. BC000449 (SEQ ID NO:9); amplicon—Ubiquitin-amplicon (SEQ ID NO:50)) and SDHA (GenBank Accession No. NM_{—}004168 (SEQ ID NO:4); amplicon—SDHA-amplicon (SEQ ID NO:29)) was measured similarly. For each RT sample, the expression of the above amplicons was normalized to the geometric mean of the quantities of the housekeeping genes. For each amplicon, the normalized quantity of each RT sample was then divided by the median of the quantities of the breast samples (Sample Nos. 33-35 Table 7, “Tissue samples in normal panel”), to obtain a value of relative expression of each sample relative to median of the breast samples.

[1949] FIG. 79 is a histogram showing expression of Homo sapiens v-erb-b2 erythroblastic leukemia viral oncogene homolog 2, neuro/glioblastoma derived oncogene homolog (avian) (ERBB2) S57296 transcripts which are detectable by amplicon as depicted in sequence name S57296 B2S seg-44 (SEQ ID NO: 552) in different normal tissues.

[1950] FIG. 80 is a histogram showing expression of Homo sapiens v-erb-b2 erythroblastic leukemia viral oncogene homolog 2, neuro/glioblastoma derived oncogene homolog (avian) (ERBB2) S57296 transcripts which are detectable by amplicon as depicted in sequence name S57296 B2Lnew seg58-59 (SEQ ID NO: 550) in different normal tissues.

[1951] FIG. 81 is a histogram showing expression of Homo sapiens v-erb-b2 erythroblastic leukemia viral oncogene homolog 2, neuro/glioblastoma derived oncogene homolog (avian) (ERBB2) S57296 transcripts which are detectable by amplicon as depicted in sequence name S57296WT seg63 (SEQ ID NO:497) in different normal tissues.

[1952] Primers:

| Forward primer S57296 B2S seg44 F: | (SEQ ID NO: 551) |
|---|---|
| CAGCGTTCTTGGACTTGTGC | |
| Reverse primer S57296 B2S seg44 R: | |
| CCAGCTAGAGAAGCCATGCC | |
| Amplicon S57296 B2S seg44: | (SEQ ID NO: 552) |
| CAGCGTTCTTGGACTTGTGCAGACTGCCCGTCTCTGTGCACCCTTCTTGACTCAGCACAGCTCT | |
| GGCTGGCTTGGCCTCTTGGCATGGCTTCTCTAGCTGG | |
| Forward primer S57296 B2Lnew seg58-59 F: | (SEQ ID NO: 548) |
| GACAAGGGCTGCCCCG | |
| Reverse primer S57296 B2Lnew seg58-59 R: | |
| CAGTGACCACCCAGCATCC | |
| Amplicon S57296-B2Lnew seg58-59: | (SEQ ID NO: 550) |
| GACAAGGGCTGCCCCGCCGAGCAGAGAGCCAGGTTGGCCTGGACCCCAGGATGTACC | |
| CTTCATTGCCCTTCACTCCCCCACTGGATGCTGGGTGGTCACTG | |
| Forward primer S57296 seg63F: | (SEQ ID NO: 555) |
| CCCATATGTCTCCCGCCTT | |
| Reverse primer S57296 seg63R: | (SEQ ID NO: 556) |
| ACATGGTCTAAGAGGCAGCCA | |
| Amplicon S57296 seg63: | (SEQ ID NO: 557) |

CCCATATGTCTCCCGCCTTCTGGGCATCTGCCTGACATCCACGGTGCAGCTGGTGACA
CAGCTTATGCCCTATGGCTGCCTCTTAGACCATGT

Expression of Homo sapiens v-erb-b2 erythroblastic leukemia viral oncogene homolog 2, neuro/glioblastoma derived oncogene homolog (avian) (ERBB2) S57296 transcripts which are detectable by amplicon as depicted in sequence name S57296 B2S seg-44 (SEQ ID NO: 552), S57296 B2Lnew seg58-59 (SEQ ID NO: 550), S57296WT seg63 (SEQ ID NO:497) in normal and cancerous ovary tissues:

[1953] Expression of Homo sapiens v-erb-b2 erythroblastic leukemia viral oncogene homolog 2, neuro/glioblastoma derived oncogene homolog (avian) (ERBB2) transcripts detectable by or according to S57296 B2S seg-44 (SEQ ID NO: 552), S57296 B2Lnew seg58-59 (SEQ ID NO: 550), S57296WT seg63 (SEQ ID NO:497) amplicons and primers S57296 B2S seg-44F (SEQ ID NO: 551), seg58-59F (SEQ ID NO: 548), seg63F (SEQ ID NO: 555) and S57296 seg-44R, seg58-59R (SEQ ID NO: 549), seg63R (SEQ ID NO: 556) was measured by real time PCR. In parallel the expression of four housekeeping genes—PBGD (GenBank Accession No. BC019323 (SEQ ID NO:6); amplicon—PBGD-amplicon (SEQ ID NO:32)), HPRT1 (GenBank Accession No. NM_{—}000194 (SEQ ID NO:5); amplicon—HPRT1-amplicon (SEQ ID NO:35)), SDHA (GenBank Accession No. NM_{—}004168 (SEQ ID NO:4); amplicon—SDHA-amplicon (SEQ ID NO:29)) and GAPDH (GenBank Accession No. BC026907 (SEQ ID NO:3); GAPDH amplicon (SEQ ID NO: 41) was measured similarly. For each RT sample, the expression of the above amplicon was normalized to the geometric mean of the quantities of the housekeeping genes. The normalized quantity of each RT sample was then divided by the median of the quantities of the normal post-mortem (PM) samples (Sample Nos. 45, 46, 48, 71, Table 3, above, “Tissue samples in ovarian cancer testing panel”), to obtain a value of fold differential expression for each sample relative to median of the normal PM samples.

[1954] In one experiment that was carried out no differential expression in the cancerous samples relative to the normal PM samples was observed. Primer pairs are also optionally and preferably encompassed within the present invention; for example, for the above experiment, the following primer pair was used as a non-limiting illustrative example only of a suitable primer pairs: S57296 B2S seg-44F (SEQ ID NO: 551), seg58-59F (SEQ ID NO: 548), seg63F (SEQ ID NO: 555) forward primers; and S57296 seg-44R, seg58-59R (SEQ ID NO: 549), seg63R (SEQ ID NO: 556) reverse primers. The present invention also preferably encompasses any amplicon obtained through the use of any suitable primer pair; for example, for the above experiment, the following amplicon was obtained as a non-limiting illustrative example only of a suitable amplicons: S57296 B2S seg-44 (SEQ ID NO: 552), S57296 B2Lnew seg58-59 (SEQ ID NO: 550), S57296-WT seg63

[1955] Primers:

| Forward primer S57296 B2S seg-44 F: | (SEQ ID NO: 551) |
|---|---|
| CAGCGTTCTTGGACTTGTGC | |
| Reverse primer S57296 B2S seg-44 R: | |
| CCAGCTAGAGAAGCCATGCC | |
| Amplicon S57296 B2S seg-44: | (SEQ ID NO: 552) |
| CAGCGTTCTTGGACTTGTGCAGACTGCCCGTCTCTGTGCACCCTTCTTGACTCAGCACAGCTCT | |
| GGCTGGCTTGGCCTCTTGGCATGGCTTCTCTAGCTGG | |
| Forward primer S57296 seg58-59 F: | (SEQ ID NO: 548) |
| GACAAGGGCTGCCCCG | |
| Reverse primer S57296 seg58-59 R: | (SEQ ID NO: 549) |
| CAGTGACCACCCAGCATCC | |
| Amplicon S57296 B2Lnew seg58-59: | (SEQ ID NO: 550) |
| GACAAGGGCTGCCCCGCCGAGCAGAGAGCCAGGTTGGCCTGGACCCCAGGATGTACCCTTCA | |
| TTGCCCTTCACTCCCCCACTGGATGCTGGGTGGTCACTG | |
| Forward primer S57296-WT seg63 F: | (SEQ ID NO: 553) |
| CCCATATGTCTCCCGCCTT | |
| Reverse primer S57296-WT seg63 R: | (SEQ ID NO: 554) |
| ACATGGTCTAAGAGGCAGCCA | |
| Amplicon S57296 WT seg63: | |

CCCATATGTCTCCCGCCTTCTGGGCATCTGCCTGACATCCACGGTGCAGCTGGTGACACAGCTT
ATGCCCTATGGCTGCCTCTTAGACCATGT

Expression of Homo sapiens v-erb-b2 erythroblastic leukemia viral oncogene homolog 2, neuro/glioblastoma derived oncogene homolog (avian) (ERBB2) S57296 transcripts which are detectable by amplicon as depicted in sequence name S57296 B2S seg-44 (SEQ ID NO: 552), S57296 B2Lnew seg58-59 (SEQ ID NO: 550) in normal and cancerous colon tissues

[1956] Expression of Homo sapiens v-erb-b2 erythroblastic leukemia viral oncogene homolog 2, neuro/glioblastoma derived oncogene homolog (avian) (ERBB2) transcripts detectable by or according to S57296 B2S seg-44 (SEQ ID NO: 552), S57296 B2Lnew seg58-59 (SEQ ID NO: 550), and primers S57296 B2S seg-44F (SEQ ID NO: 551), seg58-59F (SEQ ID NO: 548) and S57296 seg-44R, seg58-59R (SEQ ID NO: 549) was measured by real time PCR. In parallel the expression of four housekeeping genes—PBGD (GenBank Accession No. BC019323 (SEQ ID NO:6); amplicon—PBGD-amplicon (SEQ ID NO:32)), HPRT1 (GenBank Accession No. NM_{—}000194 (SEQ ID NO:5); amplicon—HPRT1-amplicon (SEQ ID NO:35)), G6PD (GenBank Accession No. NM_{—}000402 (SEQ ID NO:8); G6PD amplicon (SEQ ID NO: 44)) and RPS27A (GenBank Accession No. NM_{—}002954 (SEQ ID NO:1); RPS27A amplicon (SEQ ID NO: 47)), was measured similarly. For each RT sample, the expression of the above amplicon was normalized to the geometric mean of the quantities of the housekeeping genes. The normalized quantity of each RT sample was then divided by the median of the quantities of the normal post-mortem (PM) samples (Sample Nos. 41, 52, 62-67, 69-71, Table 4, above, “Tissue samples in colon cancer testing panel”), to obtain a value of fold up-regulation for each sample relative to median of the normal PM samples.

[1957] In one experiment that was carried out with each of the above amplicons no differential expression in the cancerous samples relative to the normal PM samples was observed.

[1958] Primer pairs are also optionally and preferably encompassed within the present invention; for example, for the above experiment, the following primer pair was used as a non-limiting illustrative example only of a suitable primer pairs: S57296 B2S seg-44F (SEQ ID NO: 551), seg58-59F (SEQ ID NO: 548), forward primers; and S57296 seg-44R, seg58-59R (SEQ ID NO: 549) reverse primers.

[1959] The present invention also preferably encompasses any amplicon obtained through the use of any suitable primer pair; for example, for the above experiment, the following amplicon was obtained as a non-limiting illustrative example only of a suitable amplicons: S57296 B2S seg-44 (SEQ ID NO: 552), S57296 B2Lnew seg58-59 (SEQ ID NO: 550), S57296-WT seg63

[1960] Primers:

| Forward primer S57296 B2S seg-44 F: | (SEQ ID NO: 551) |
|---|---|
| CAGCGTTCTTGGACTTGTGC | |
| Reverse primer S57296 B2S seg-44 R: | |
| CCAGCTAGAGAAGCCATGCC | |
| Amplicon S57296 B2S seg-44: | (SEQ ID NO: 552) |
| CAGCGTTCTTGGACTTGTGCAGACTGCCCGTCTCTGTGCACCCTTCTTGACTCAGCACAGCTCT | |
| GGCTGGCTTGGCCTCTTGGCATGGCTTCTCTAGCTGG | |
| Forward primer S57296 seg58-59 F: | (SEQ ID NO: 548) |
| GACAAGGGCTGCCCCG | |
| Reverse primer S57296 seg58-59 R: | (SEQ ID NO: 549) |
| CAGTGACCACCCAGCATCC | |
| Amplicon S57296 B2Lnew seg58-59: | (SEQ ID NO: 550) |

GACAAGGGCTGCCCCGCCGAGCAGAGAGCCAGGTTGGCCTGGACCCCAGGATGTACCCTTCA
TTGCCCTTCACTCCCCCACTGGATGCTGGGTGGTCACTG

Expression of Homo sapiens v-erb-b2 erythroblastic leukemia viral oncogene homolog 2, neuro/glioblastoma derived oncogene homolog (avian) (ERBB2) S57296 transcripts which are detectable by amplicon as depicted in sequence name S57296WT seg63 (SEQ ID NO:497) in normal and cancerous breast tissues

[1961] Expression of Homo sapiens v-erb-b2 erythroblastic leukemia viral oncogene homolog 2, neuro/glioblastoma derived oncogene homolog (avian) (ERBB2) transcripts detectable by or according to seg63-by S57296WT seg63 (SEQ ID NO:497) amplicon and primers S57296 seg63F (SEQ ID NO: 555) and S57296 seg63R (SEQ ID NO: 556) was measured by real time PCR. In parallel the expression of four housekeeping genes—PBGD (GenBank Accession No. BC019323 (SEQ ID NO:6); amplicon—PBGD-amplicon (SEQ ID NO:32)), HPRT1 (GenBank Accession No. NM_{—}000194 (SEQ ID NO:5); amplicon—HPRT1-amplicon (SEQ ID NO:35)), SDHA (GenBank Accession No. NM_{—}004168 (SEQ ID NO:4); amplicon—SDHA-amplicon (SEQ ID NO:29)) and G6PD (GenBank Accession No. NM_{—}000402 (SEQ ID NO:8); G6PD amplicon (SEQ ID NO: 44)) was measured similarly. For each RT sample, the expression of the above amplicon was normalized to the geometric mean of the quantities of the housekeeping genes. The normalized quantity of each RT sample was then divided by the median of the quantities of the normal post-mortem (PM) and post surgery (PS) samples (Sample Nos. 56-60, 63-67, Table 6, above, “Tissue samples in breast cancer testing panel”), to obtain a value of fold up-regulation for each sample relative to median of the normal PM samples.

[1962] FIG. 82 is a histogram showing over expression of the above-indicated Homo sapiens v-erb-b2 erythroblastic leukemia viral oncogene homolog 2, neuro/glioblastoma derived oncogene homolog (avian) (ERBB2) transcripts in cancerous breast samples relative to the normal samples.

[1963] As is evident from FIG. 82, the expression of Homo sapiens v-erb-b2 erythroblastic leukemia viral oncogene homolog 2, neuro/glioblastoma derived oncogene homolog (avian) (ERBB2) transcripts detectable by the above amplicon in cancer samples was significantly higher than in the non-cancerous samples (Sample Nos. 56-60, 63-67 Table 6, “Tissue samples in breast cancer testing panel”). Notably an over-expression of at least 5 fold was found in 6 out of 28 adenocarcinoma samples.

[1964] By dissecting the patient's population into four age groups (indicated below the graph), we demonstrate that the transcripts detected by the above amplicon are highly expressed mainly in the 45-55 age group.

[1965] One of the normal samples (Sample No. 56, Table 6, above, “Tissue samples in breast cancer testing panel”) showed high over-expression of all checked ErbB-2 transcripts. Since over-expression of ErbB-2 WT was observed in this sample, and also over-expression of hTERT which is known to be expressed only in cancerous cells (data not shown), it is thought that this sample is either contaminated with cancerous cells, or alternatively may have been marked by mistake as a normal sample.

[1966] ErbB2 WT was over expressed at least 5 fold also in 1 of the 5 matched normal samples. Since matched samples are histologically non-cancerous tissue that surrounds the tumor, such samples could have been contaminated with cancer or pre-cancer cells.

[1967] Primer pairs are also optionally and preferably encompassed within the present invention; for example, for the above experiment, the following primer pair was used as a non-limiting illustrative example only of a suitable primer pair: S57296 seg63F (SEQ ID NO: 555) forward primer; and S57296 seg63R (SEQ ID NO: 556) reverse primer.

[1968] The present invention also preferably encompasses any amplicon obtained through the use of any suitable primer pair; for example, for the above experiment, the following amplicon was obtained as a non-limiting illustrative example only of a suitable amplicon: S57296 seg63 (SEQ ID NO:557).

[1969] Primers:

| | |
|---|---|
| Forward primer S57296-WT seg63 F: | (SEQ ID NO: 553) |
| CCCATATGTCTCCCGCCTT | |
| Reverse primer S57296-WT seg63 R: | (SEQ ID NO: 554) |
| ACATGGTCTAAGAGGCAGCCA | |
| Amplicon S57296 seg63: | (SEQ ID NO: 557) |

CCCATATGTCTCCCGCCTTCTGGGCATCTGCCTGACATCCACGGTGCAGCTGGTGACACAGCTT
ATGCCCTATGGCTGCCTCTTAGACCATGT

Expression of Homo sapiens v-erb-b2 erythroblastic leukemia viral oncogene homolog 2, neuro/glioblastoma derived oncogene homolog (avian) (ERBB2) S57296 transcripts which are detectable by amplicon as depicted in sequence name S57296 B2S seg-44 (SEQ ID NO: 552) in normal and cancerous breast tissues

[1970] Expression of Homo sapiens v-erb-b2 erythroblastic leukemia viral oncogene homolog 2, neuro/glioblastoma derived oncogene homolog (avian) (ERBB2) transcripts detectable by or according to seg-44-by S57296 B2S seg-44 (SEQ ID NO: 552) amplicon and primers S57296 seg44F and S57296 seg44R was measured by real time PCR. In parallel the expression of four housekeeping genes—PBGD (GenBank Accession No. BC019323 (SEQ ID NO:6); amplicon—PBGD-amplicon (SEQ ID NO:32)), HPRT1 (GenBank Accession No. NM_{—}000194 (SEQ ID NO:5); amplicon—HPRT1-amplicon (SEQ ID NO:35)), SDHA (GenBank Accession No. NM_{—}004168 (SEQ ID NO:4); amplicon—SDHA-amplicon (SEQ ID NO:29)) and G6PD (GenBank Accession No. NM_{—}000402 (SEQ ID NO:8); G6PD amplicon (SEQ ID NO: 44)) was measured similarly. For each RT sample, the expression of the above amplicon was normalized to the geometric mean of the quantities of the housekeeping genes. The normalized quantity of each RT sample was then divided by the median of the quantities of the normal post-mortem (PM) and post surgery (PS) samples (Sample Nos. 56-60, 63-67, Table 6, above, “Tissue samples in breast cancer testing panel”), to obtain a value of fold up-regulation for each sample relative to median of the normal PM samples.

[1971] FIG. 83 is a histogram showing over expression of the above-indicated Homo sapiens v-erb-b2 erythroblastic leukemia viral oncogene homolog 2, neuro/glioblastoma derived oncogene homolog (avian) (ERBB2) transcripts in cancerous breast samples relative to the normal samples. Values represent the average of duplicate experiments. Error bars indicate the minimal and maximal values obtained.

[1972] As is evident from FIG. 83, the expression of Homo sapiens v-erb-b2 erythroblastic leukemia viral oncogene homolog 2, neuro/glioblastoma derived oncogene homolog (avian) (ERBB2) transcripts detectable by the above amplicon in cancer samples was significantly higher than in the non-cancerous samples (Sample Nos. 56-60, 63-67 Table 6 “Tissue samples in breast cancer testing panel”). Notably an over-expression of at least 5 fold was found in 9 out of 28 adenocarcinoma samples.

[1973] By dissecting the patient's population into four age groups (indicated below the graph), we demonstrate that the transcripts detected by the above amplicon are highly expressed mainly in the 45-55 age group.

[1974] One of the normal samples (Sample No. 56, Table 6, above, “Tissue samples in breast cancer testing panel”) showed high over-expression of all checked ErbB-2 transcripts. Since over-expression of ErbB-2 WT was observed in this sample, and also over-expression of hTERT which is known to be expressed only in cancerous cells (data not shown), it is thought that this sample is either contaminated with cancerous cells, or alternatively may have been marked by mistake as a normal sample.

[1975] The B2S variants were over expressed at least 5 fold also in I of the 5 matched normal samples. Since matched samples are histologically non-cancerous tissue that surrounds the tumor, such samples could have been contaminated with cancer or pre-cancer cells.

[1976] Primer pairs are also optionally and preferably encompassed within the present invention; for example, for the above experiment, the following primer pair was used as a non-limiting illustrative example only of a suitable primer pair: S57296 seg44F forward primer; and S57296 seg44R reverse primer.

[1977] The present invention also preferably encompasses any amplicon obtained through the use of any suitable primer pair; for example, for the above experiment, the following amplicon was obtained as a non-limiting illustrative example only of a suitable amplicon: S57296 seg44 (SEQ ID NO:552).

[1978] Primers:

| | |
|---|---|
| Forward primer S57296 B2S seg-44 F: | (SEQ ID NO: 551) |
| CAGCGTTCTTGGACTTGTGC | |
| Reverse primer S57296 B2S seg-44 R: | |
| CCAGCTAGAGAAGCCATGCC | |
| Amplicon S57296 B2S seg-44: | (SEQ ID NO: 552) |

CAGCGTTCTTGGACTTGTGCAGACTGCCCGTCTCTGTGCACCCTTCTTGACTCAGCACAGCTCT
GGCTGGCTTGGCCTCTTGGCATGGCTTCTCTAGCTGG

[1979] Combined expression of 4 sequences—S57296 B2S seg-44 (SEQ ID NO: 552), S57296 B2Lnew seg58-59 (SEQ ID NO: 550), HSSTROL seg20-21 (SEQ ID NO: 560), T94936 seg14 (SEQ ID NO: 563) in normal and cancerous breast tissues.

[1980] Expression of v-erb-b2 erythroblastic leukemia viral oncogene homolog 2, neuro/glioblastoma derived oncogene homolog (avian) (ERBB2), Homo sapiens matrix metalloproteinase 11 (stromelysin 3) (MMP11), Homo sapiens breast cancer membrane protein 11 (BCMP11) transcripts detectable by or according to S57296 B2S seg-44 (SEQ ID NO: 552), S57296 B2Lnew seg58-59 (SEQ ID NO: 550), HSSTROL seg20-21 (SEQ ID NO: 560), T94936 seg14 (SEQ ID NO: 563) amplicons and primers—S57296 B2S seg-44F (SEQ ID NO: 551) and S57296 seg-44R; seg58-59F (SEQ ID NO: 548) and seg58-59R (SEQ ID NO: 549); HSSTROL seg20-21F (SEQ ID NO:558) and HSSTROL seg20-21R (SEQ ID NO:559); T94936 seg14F (SEQ ID NO:561) and T94936 seg14R (SEQ ID NO:562) was measured by real time PCR. In parallel the expression of four housekeeping genes—PBGD (GenBank Accession No. BC019323 (SEQ ID NO:6); amplicon—PBGD-amplicon (SEQ ID NO:32)), HPRT1 (GenBank Accession No. NM_{—}000194 (SEQ ID NO:5); amplicon—HPRT1-amplicon (SEQ ID NO:35)), SDHA (GenBank Accession No. NM_{—}004168 (SEQ ID NO:4); amplicon—SDHA-amplicon (SEQ ID NO:29)), G6PD (GenBank Accession No. NM_{—}000402 (SEQ ID NO:8); G6PD amplicon (SEQ ID NO: 44)), was measured similarly. For each RT sample, the expression of the above amplicons was normalized to the geometric mean of the quantities of the housekeeping genes. The normalized quantity of each RT sample of each amplicon was then divided by the median of the quantities of the normal post-mortem (PM) samples detected for the same amplicon (Sample Nos. 56-60, 63-67, Table 6, above, “Tissue samples in breast cancer testing panel”), to obtain a value of fold up-regulation for each sample relative to median of the normal PM samples.

[1981] FIG. 84 is a histogram showing differential expression of the above-indicated transcripts in cancerous breast samples relative to the normal samples. The number and percentage of samples that exhibit at least 5 fold differential of at least one of the sequences, out of the total number of samples tested is indicated in the bottom.

[1982] As is evident from FIG. 84, differential expression of at least 5 fold in at least one of the sequences was found in 26 out of 28 adenocarcinoma samples.

[1983] Primers:

| Forward primer S57296 B2S seg-44 F: | (SEQ ID NO: 551) |
|---|---|
| CAGCGTTCTTGGACTTGTGC | |
| Reverse primer S57296 B2S seg-44 R: | |
| CCAGCTAGAGAAGCCATGCC | |
| Amplicon S57296 B2S seg-44: | (SEQ ID NO: 552) |
| CAGCGTTCTTGGACTTGTGCAGACTGCCCGTCTCTGTGCACCCTTCTTGACTCAGCACAGCTCT | |
| GGCTGGCTTGGCCTCTTGGCATGGCTTCTCTAGCTGG | |
| Forward primer S57296 seg58-59 F: | (SEQ ID NO: 548) |
| GACAAGGGCTGCCCCG | |
| Reverse primer S57296 seg58-59 R: | (SEQ ID NO: 549) |
| CAGTGACCACCCAGCATCC | |
| Amplicon S57296 B2Lnew seg58-59: | (SEQ ID NO: 550) |
| GACAAGGGCTGCCCCGCCGAGCAGAGAGCCAGGTTGGCCTGGACCCCAGGATGTACCCTTCA | |
| TTGCCCTTCACTCCCCCACTGGATGCTGGGTGGTCACTG | |
| Forward primer HSSTROL seg20-21F: | (SEQ ID NO: 558) |
| TCTGCTGGCCACTGTGACTG | |
| Reverse primer HSSTROL seg20-21R: | (SEQ ID NO: 559) |
| GAAGAAAAAGAGCTCGCCTCG | |
| Amplicon HSSTROL seg20-21: | (SEQ ID NO: 560) |
| TCTGCTGGCCACTGTGACTGCAGCATATGCCCTCAGCATGTGTCCCTCTCTCCCACCCCAGCCA | |
| GACGCCCCGCCAGATGCCTGTGAGGCCTCCTTTGACGCGGTCTCCACCATCCGAGGCGAGCTC | |
| TTTTTCTTC | |
| Forward primer T94936 seg14F: | (SEQ ID NO: 561) |
| TACAAAATTAGTAGAAATCAGCATTCTTGC | |
| Reverse primer T94936 seg14R: | (SEQ ID NO: 562) |
| TGTAGAACTAACAAGAGCTGATATTATTGGAT | |
| Amplicon T94936 seg14: | (SEQ ID NO: 563) |

TACAAAATTAGTAGAAATCAGCATTCTTGCTTTTATTTTTAAATGCTAGTTCAAGTACTATTCT
TTTTAAAGAGAAGTCATTTCTAATCCAATAATATCAGCTCTTGTTAGTTCTACA

### Description for Cluster Z36249

[1984] Cluster Z36249 features 4 transcript(s) and 11 segment(s) of interest, the names for which are given in Tables 229 and 230, respectively. The selected protein variants are given in table 231.

TABLE 229
Transcripts of interest
Transcript Name

Z36249_PEA_3_T2 (SEQ ID NO: 564)
Z36249_PEA_3_T3 (SEQ ID NO: 565)
Z36249_PEA_3_T5 (SEQ ID NO: 566)
Z36249_PEA_3_T9 (SEQ ID NO: 567)

TABLE 230
Segments of interest

Segment Name

| | |
|---|---|
| Z36249_PEA_3_node_0 (SEQ ID NO: 568) | Z36249_PEA_3_T2 (SEQ ID NO: 564), |
| | Z36249_PEA_3_T3 (SEQ ID NO: 565), |
| | Z36249_PEA_3_T5 (SEQ ID NO: 566) and |
| | Z36249_PEA_3_T9 (SEQ ID NO: 567) |
| Z36249_PEA_3_node_3 (SEQ ID NO: 569) | Z36249_PEA_3_T2 (SEQ ID NO: 564), |
| | Z36249_PEA_3_T3 (SEQ ID NO: 565), |
| | Z36249_PEA_3_T5 (SEQ ID NO: 566) and |
| | Z36249_PEA_3_T9 (SEQ ID NO: 567) |
| Z36249_PEA_3_node_5 (SEQ ID NO: 570) | Z36249_PEA_3_T2 (SEQ ID NO: 564), |
| | Z36249_PEA_3_T3 (SEQ ID NO: 565), |
| | Z36249_PEA_3_T5 (SEQ ID NO: 566) and |
| | Z36249_PEA_3_T9 (SEQ ID NO: 567) |
| Z36249_PEA_3_node_11 (SEQ ID NO: 571) | Z36249_PEA_3_T5 (SEQ ID NO: 566) |
| Z36249_PEA_3_node_14 (SEQ ID NO: 572) | Z36249_PEA_3_T3 (SEQ ID NO: 565) |
| Z36249_PEA_3_node_24 (SEQ ID NO: 573) | Z36249_PEA_3_T2 (SEQ ID NO: 564) and |
| | Z36249_PEA_3_T9 (SEQ ID NO: 567) |
| Z36249_PEA_3_node_10 (SEQ ID NO: 574) | Z36249_PEA_3_T3 (SEQ ID NO: 565), |
| | Z36249_PEA_3_T5 (SEQ ID NO: 566) and |
| | Z36249_PEA_3_T9 (SEQ ID NO: 567) |
| Z36249_PEA_3_node_13 (SEQ ID NO: 575) | Z36249_PEA_3_T2 (SEQ ID NO: 564) and |
| | Z36249_PEA_3_T3 (SEQ ID NO: 565) |
| Z36249_PEA_3_node_17 (SEQ ID NO: 576) | Z36249_PEA_3_T2 (SEQ ID NO: 564) and |
| | Z36249_PEA_3_T9 (SEQ ID NO: 567) |
| Z36249_PEA_3_node_19 (SEQ ID NO: 577) | Z36249_PEA_3_T2 (SEQ ID NO: 564) and |
| | Z36249_PEA_3_T9 (SEQ ID NO: 567) |
| Z36249_PEA_3_node_21 (SEQ ID NO: 578) | Z36249_PEA_3_T2 (SEQ ID NO: 564) and |
| | Z36249_PEA_3_T9 (SEQ ID NO: 567) |

TABLE 231
Proteins of interest

| Protein Name | Corresponding Transcript(s) |
|---|---|
| Z36249_PEA_3_P2 | Z36249_PEA_3_T2 (SEQ ID NO: 564) |
| (SEQ ID NO: 579) | |
| Z36249_PEA_3_P3 | Z36249_PEA_3_T3 (SEQ ID NO: 565) |
| (SEQ ID NO: 580) | |
| Z36249_PEA_3_P4 | Z36249_PEA_3_T5 (SEQ ID NO: 566) |
| (SEQ ID NO: 581) | |
| Z36249_PEA_3_P5 | Z36249_PEA_3_T9 (SEQ ID NO: 567) |
| (SEQ ID NO: 582) | |

[1985] These sequences are variants of the known protein ANKRD1 (ankyrin repeat domain 1 (cardiac muscle)) (SwissProt accession identifier Q96LE7_HUMAN (SEQ ID NO:693); known also according to the synonyms Q96LE7), referred to herein as the previously known protein.

[1986] According to optional but preferred embodiments of the present invention, variants of this cluster according to the present invention (amino acid and/or nucleic acid sequences of Z36249) may optionally have one or more of the following utilities, as described with regard to Table 232 below. It should be noted that these utilities are optionally and preferably suitable for human and non-human animals as subjects, except where otherwise noted. The reasoning is described with regard to biological and/or physiological and/or other information about the known protein, but is given to demonstrate particular diagnostic utility for the variants according to the present invention.

TABLE 232
Utilities for Variants of Z36249, related to ANKRD1 ankyrin repeat
domain 1 (cardiac muscle):

| Utility | Reason | Reference |
|---|---|---|
| Conductivity problems in the | ANKRD1 plays a | J Mol Cell Cardiol. 2005 |
| heart | pathophysiological role in the | Feb; 38(2): 353-65. Epub 2005 Jan 26 |
| | contractile responsiveness of | |
| | myocardium. | |
| Marker for wound healing | CARP treatment also induced | Am J Pathol. 2005 Jan; 166(1): 303-12; |
| and neuvascularization (in | neovascularization and | Cardiovasc Res. 2003 Sep |
| wound and heart) | increased blood perfusion in | 1; 59(3): 573-81. |
| | rabbit excisional wounds in | |
| | and ischemic rat wounds. | |
| Diagnosis of spinal muscular | CARP was expressed | Pathol Int. 2003 Oct; 53(10): 653-8; |
| atrophy (SMA) congenital | selectively in severely | Lab Invest. 2003 May; 83(5): 711-9. |
| myopathy, and muscular | atrophic myofibers, | |
| dystrophy | suggesting that CARP | |
| | expression may reflect the | |
| | status of muscle atrophy. | |
| Detection of hypertrophic | CARP is induced in the adult | Lab Invest. 2003 May; 83(5): 711-9. |
| heart (with pressure overload) | hypertrophic heart subjected | |
| | to pressure overload | |
| Diagnosis heart failure | CARP mRNA and protein | Biochem Biophys Res Commun. |
| (especially left ventricle), | levels were markedly | 2002 May 24; 293(5): 1377-82; |
| | increased in failing left | Hypertension. 2000 Jul; 36(1): 48-53. |
| | ventricles (obtained from | |
| | heart explants of end stage | |
| | failure hearts) | |

[1987] According to other optional embodiments of the present invention, variants or this cluster according to the present invention (amino acid and/or nucleic acid sequences of Z36249) may optionally have one or more of the following utilities, some of which are related to utilities described above. It should be noted that these utilities are optionally and preferably suitable for human and non-human animals as subjects, except where otherwise noted.

Table 233 below describes diagnostic utilities for the cluster Z36249 that were found through microarrays, including the statistical significance thereof and a reference. One or more Z36249 variants according to the present invention may optionally have one or more of these utilities.

TABLE 233

| Utility | Significance | Reference |
|---|---|---|
| Detection of estrogen receptor | OX in 10 out of 10 ERb | GDS884 |
| beta expressing cells for | transfected cells vs 0 out | |
| hormone therapy in breast | of 10 ERa transfected | |
| cancer. | cells. | |
| Detection of classical Glioma. | 9.2E−9 | Cancer Res. |
| Gene OX in classical Glioma | | 2003 Apr 1; |
| Vs. non classical. | | 63(7): 1602-7. |

[1988] Other non-limiting exemplary utilities for Z36249 variants according to the present invention are described in greater detail below and also with regard to the previous section on clinical utility.

[1989] The heart-selective diagnostic marker prediction engine provided the following results with regard to cluster Z36249. Predictions were made for selective expression of transcripts of this cluster in heart tissue, according to the previously described methods. The numbers on the y-axis of FIG. 85 refer to weighted expression of ESTs in each category, as “parts per million” (ratio of the expression of ESTs for a particular cluster to the expression of all ESTs in that category, according to parts per million).

[1990] Overall, the following results were obtained as shown with regard to the histogram in FIG. 85, concerning the number of heart-specific clones in libraries/sequences; as well as with regard to the histogram in FIG. 86, concerning the actual expression of oligonucleotides in various tissues, including heart.

[1991] This cluster was found to be selectively expressed in heart for the following reasons: in a comparison of the ratio of expression of the cluster in heart specific ESTs to the overall expression of the cluster in non-heart ESTs, which was found to be 33.8; the ratio of expression of the cluster in heart specific ESTs to the overall expression of the cluster in muscle-specific ESTs which was found to be 27.8; and fisher exact test P-values were computed both for library and weighted clone counts to check that the counts are statistically significant, and were found to be 1.60E-47.

[1992] One particularly important measure of specificity of expression of a cluster in heart tissue is the previously described comparison of the ratio of expression of the cluster in heart as opposed to muscle. This cluster was found to be specifically expressed in heart as opposed to non-heart ESTs as described above. However, many proteins have been shown to be generally expressed at a higher level in both heart and muscle, which is less desirable. For this cluster, as described above, the ratio of expression of the cluster in heart specific ESTs to the overall expression of the cluster in muscle-specific ESTs which was found to be 33.8, which clearly supports specific expression in heart tissue

[1993] As noted above, cluster Z36249 features 4 transcript(s), which were listed in Table 229 above. A description of each variant protein according to the present invention is now provided.

[1994] Variant protein Z36249_PEA_{—}3_P2 (SEQ ID NO:579) according to the present invention has an amino acid sequence; it is encoded by transcript(s) Z36249_PEA_{—}3_T2 (SEQ ID NO:564). One or more alignments to one or more previously published protein sequences are given in the alignment table located on the attached CDROM. A brief description of the relationship of the variant protein according to the present invention to each such aligned protein is as follows:

[1995] Comparison Report Between Z36249_PEA_{—}3_P2 (SEQ ID NO:579) and Q96LE7:

[1996] 1. An isolated chimeric polypeptide encoding for Z36249_PEA_{—}3_P2 (SEQ ID NO:579), comprising a first amino acid sequence being at least 90% homologous to MMVLKVEELVTGKKNGNGEAGEFLPEDFRDGEYEAAVTLEKQEDLKTLLAHPVTLGEQQWKSE KQREAELKKKKLEQRSKLENLEDLEIIIQLKKRKKYRKTKVPVVKEPEPEII corresponding to amino acids 1-115 of Q96LE7, which also corresponds to amino acids 1-115 of Z36249_PEA_{—}3_P2 (SEQ ID NO:579), and a second amino acid sequence being at least 90% homologous to YKRTALHRACLEGHLAIVEKLMEAGAQIEFRDMLESTAIHWASRGGNLDVLKLLLNKGAKISARD KLLSTALHVAVRTGHYECAEHLIACEADLNAKDREGDTPLHDAVRLNRYKMIRLLIMYGADLNIK NCAGKTPMDLVLHWQNGTKAIFDSLRENSYKTSRIATF corresponding to amino acids 152-319 of Q96LE7, which also corresponds to amino acids 116-283 of Z36249_PEA_{—}3_P2 (SEQ ID NO:579), wherein said first amino acid sequence and second amino acid sequence are contiguous and in a sequential order.

[1997] 2. An isolated chimeric polypeptide encoding for an edge portion of Z36249_PEA_{—}3_P2 (SEQ ID NO:579), comprising a polypeptide having a length “n”, wherein n is at least about 10 amino acids in length, optionally at least about 20 amino acids in length, preferably at least about 30 amino acids in length, more preferably at least about 40 amino acids in length and most preferably at least about 50 amino acids in length, wherein at least two amino acids comprise IY, having a structure as follows: a sequence starting from any of amino acid numbers 115−x to 115; and ending at any of amino acid numbers 116+((n−2)−x), in which x varies from 0 to n−2.

[1998] Comparison Report Between Z36249_PEA_{—}3_P2 (SEQ ID NO:579) and Q15327:

[1999] 1. An isolated chimeric polypeptide encoding for Z36249_PEA_{—}3_P2 (SEQ ID NO:579), comprising a first amino acid sequence being at least 90% homologous to MMVLKVEELVTGKKNGNGEAGEFLPEDFRDGEYEAAVTLEKQEDLKTLLAHPVTLGEQQWKSE KQREAEL corresponding to amino acids 1-70 of Q15327, which also corresponds to amino acids 1-70 of Z36249_PEA_{—}3_P2 (SEQ ID NO:579), a bridging amino acid K corresponding to amino acid 71 of Z36249_PEA_{—}3_P2 (SEQ ID NO:579), a second amino acid sequence being at least 90% homologous to KKKLEQRSKLENLEDLEIIIQLKKRKKYRKTKVPVVKEPEPEII corresponding to amino acids 72-115 of Q15327, which also corresponds to amino acids 72-115 of Z36249_PEA_{—}3_P2 (SEQ ID NO:579), and a third amino acid sequence being at least 90% homologous to YKRTALHRACLEGHLAIVEKLMEAGAQIEFRDMLESTAIHWASRGGNLDVLKLLLNKGAKISARD KLLSTALHVAVRTGHYECAEHLIACEADLNAKDREGDTPLHDAVRLNRYKMIRLLIMYGADLNIK NCAGKTPMDLVLHWQNGTKAIFDSLRENSYKTSRIATF corresponding to amino acids 152-319 of Q15327, which also corresponds to amino acids 116-283 of Z36249_PEA_{—}3_P2 (SEQ ID NO:579), wherein said first amino acid sequence, bridging amino acid, second amino acid sequence and third amino acid sequence are contiguous and in a sequential order.

[2000] 2. An isolated chimeric polypeptide encoding for an edge portion of Z36249_PEA_{—}3_P2 (SEQ ID NO:579), comprising a polypeptide having a length “n”, wherein n is at least about 10 amino acids in length, optionally at least about 20 amino acids in length, preferably at least about 30 amino acids in length, more preferably at least about 40 amino acids in length and most preferably at least about 50 amino acids in length, wherein at least two amino acids comprise IY, having a structure as follows: a sequence starting from any of amino acid numbers 115−x to 115; and ending at any of amino acid numbers 116+((n−2)−x), in which x varies from 0 to n−2.

[2001] The location of the variant protein was determined according to results from a number of different software programs and analyses, including analyses from SignalP and other specialized programs. The variant protein is believed to be located as follows with regard to the cell: intracellularly. The protein localization is believed to be intracellularly because neither of the trans-membrane region prediction programs predicted a trans-membrane region for this protein. In addition both signal-peptide prediction programs predict that this protein is a non-secreted protein.

[2002] Variant protein Z36249_PEA_{—}3_P2 (SEQ ID NO:579) also has the following non-silent SNPs (Single Nucleotide Polymorphisms) as listed in Table 234, (given according to their position(s) on the amino acid sequence, with the alternative amino acid(s) listed; the last column indicates whether the SNP is known or not; the presence of known SNPs in variant protein Z36249_PEA_{—}3_P2 (SEQ ID NO:579) sequence provides support for the deduced sequence of this variant protein according to the present invention).

TABLE 234
Amino acid mutations

| SNP position(s) on amino | Alternative | Previously |
|---|---|---|
| acid sequence | amino acid(s) | known SNP? |
| 34 | E -> * | Yes |

[2003] Variant protein Z36249_PEA_{—}3_P2 (SEQ ID NO:579) is encoded by the following transcript(s): Z36249_PEA_{—}3_T2 (SEQ ID NO:564). The coding portion of transcript Z36249_PEA_{—}3_T2 (SEQ ID NO:564) starts at position 250 and ends at position 1098. The transcript also has the following SNPs as listed in Table 235 (given according to their position on the nucleotide sequence, with the alternative nucleic acid listed; the last column indicates whether the SNP is known or not; the presence of known SNPs in variant protein Z36249_PEA_{—}3_P2 (SEQ ID NO:579) sequence provides support for the deduced sequence of this variant protein according to the present invention).

TABLE 235
Nucleic acid SNPs

| SNP position on nucleotide | Alternative | Previously |
|---|---|---|
| sequence | nucleic acid | known SNP? |
| 105 | T -> C | Yes |
| 208 | T -> | No |
| 349 | G -> T | Yes |
| 459 | C -> A | No |
| 1160 | A -> G | Yes |
| 1356 | C -> T | Yes |
| 1417 | C -> T | Yes |
| 1516 | C -> T | Yes |
| 1601 | C -> T | Yes |
| 1705 | G -> A | Yes |
| 1761 | G -> A | Yes |
| 1969 | G -> A | Yes |
| 1974 | G -> A | Yes |
| 2047 | G -> A | Yes |

[2004] Variant protein Z36249_PEA_{—}3_P3 (SEQ ID NO:580) according to the present invention has an amino acid sequence; it is encoded by transcript(s) Z36249_PEA_{—}3_T3 (SEQ ID NO:565). One or more alignments to one or more previously published protein sequences are in the alignment table located on the attached CDROM. A brief description of the relationship of the variant protein according to the present invention to each such aligned protein is as follows:

[2005] Comparison Report Between Z36249_PEA_{—}3_P3 (SEQ ID NO:580) and Q96LE7:

[2006] 1. An isolated chimeric polypeptide encoding for Z36249_PEA_{—}3_P3 (SEQ ID NO:580), comprising a first amino acid sequence being at least 90% homologous to MMVLKVEELVTGKKNGNGEAGEFLPEDFRDGEYEAAVTLEKQEDLKTLLAHPVTLGEQQWKSE KQREAELKKKKLEQRSKLENLEDLEIIIQLKKRKKYRKTKVPVVKEPEPEIITEPVDVPTFLKAALE NKLPVVEKFLSDKNNPDVCDEYKRTALHRACLEGHLAIVEKLMEAGAQIEFRDM corresponding to amino acids 1-184 of Q96LE7, which also corresponds to amino acids 1-184 of Z36249_PEA_{—}3_P3 (SEQ ID NO:580), and a second amino acid sequence being at least 70%, optionally at least 80%, preferably at least 85%, more preferably at least 90% and most preferably at least 95% homologous to a polypeptide having the sequence VNIFLCLGMSQKK (SEQ ID NO: 665) corresponding to amino acids 185-197 of Z36249_PEA_{—}3_P3 (SEQ ID NO:580), wherein said first amino acid sequence and second amino acid sequence are contiguous and in a sequential order.

[2007] 2. An isolated polypeptide encoding for a tail of Z36249_PEA_{—}3_P3 (SEQ ID NO:580), comprising a polypeptide being at least 70%, optionally at least about 80%, preferably at least about 85%, more preferably at least about 90% and most preferably at least about 95% homologous to the sequence VNIFLCLGMSQKK (SEQ ID NO: 665) in Z36249_PEA_{—}3_P3 (SEQ ID NO:580).

[2008] Comparison Report Between Z36249_PEA_{—}3_P3 (SEQ ID NO:580) and Q15327:

[2009] 1. An isolated chimeric polypeptide encoding for Z36249_PEA_{—}3_P3 (SEQ ID NO:580), comprising a first amino acid sequence being at least 90% homologous to MMVLKVEELVTGKKNGNGEAGEFLPEDFRDGEYEAAVTLEKQEDLKTLLAHPVTLGEQQWKSE KQREAEL corresponding to amino acids 1-70 of Q15327, which also corresponds to amino acids 1-70 of Z36249_PEA_{—}3_P3 (SEQ ID NO:580), a bridging amino acid K corresponding to amino acid 71 of Z36249_PEA_{—}3_P3 (SEQ ID NO:580), a second amino acid sequence being at least 90% homologous to KKKLEQRSKLENLEDLEIIIQLKKRKKYRKTKVPVVKEPEPEIITEPVDVPTFLKAALENKLPVVEKF LSDKNNPDVCDEYKRTALHRACLEGHLAIVEKLMEAGAQIEFRDM corresponding to amino acids 72-184 of Q15327, which also corresponds to amino acids 72-184 of Z36249_PEA_{—}3_P3 (SEQ ID NO:580), and a third amino acid sequence being at least 70%, optionally at least 80%, preferably at least 85%, more preferably at least 90% and most preferably at least 95% homologous to a polypeptide having the sequence VNIFLCLGMSQKK (SEQ ID NO: 665) corresponding to amino acids 185-197 of Z36249_PEA_{—}3_P3 (SEQ ID NO:580), wherein said first amino acid sequence, bridging amino acid, second amino acid sequence and third amino acid sequence are contiguous and in a sequential order.

[2010] 2. An isolated polypeptide encoding for a tail of Z36249_PEA_{—}3_P3 (SEQ ID NO:580), comprising a polypeptide being at least 70%, optionally at least about 80%, preferably at least about 85%, more preferably at least about 90% and most preferably at least about 95% homologous to the sequence VNIFLCLGMSQKK (SEQ ID NO: 665) in Z36249_PEA_{—}3_P3 (SEQ ID NO:580). The location of the variant protein was determined according to results from a number of different software programs and analyses, including analyses from SignalP and other specialized programs. The variant protein is believed to be located as follows with regard to the cell: intracellularly. The protein localization is believed to be intracellularly because neither of the trans-membrane region prediction programs predicted a trans-membrane region for this protein. In addition both signal-peptide prediction programs predict that this protein is a non-secreted protein.

[2011] Variant protein Z36249_PEA_{—}3_P3 (SEQ ID NO:580) also has the following non-silent SNPs (Single Nucleotide Polymorphisms) as listed in Table 236, (given according to their position(s) on the amino acid sequence, with the alternative amino acid(s) listed; the last column indicates whether the SNP is known or not; the presence of known SNPs in variant protein Z36249_PEA_{—}3_P3 (SEQ ID NO:580) sequence provides support for the deduced sequence of this variant protein according to the present invention).

TABLE 236
Amino acid mutations

| SNP position(s) on amino acid | Alternative | Previously |
|---|---|---|
| sequence | amino acid(s) | known SNP? |
| 34 | E -> * | Yes |

[2012] Variant protein Z36249_PEA_{—}3_P3 (SEQ ID NO:580) is encoded by the following transcript(s): Z36249_PEA_{—}3_T3 (SEQ ID NO:565). The coding portion of transcript Z36249 PEA_{—}3_T3 (SEQ ID NO:565) starts at position 250 and ends at position 840. The transcript also has the following SNPs as listed in Table 237 (given according to their position on the nucleotide sequence, with the alternative nucleic acid listed; the last column indicates whether the SNP is known or not; the presence of known SNPs in variant protein Z36249_PEA_{—}3_P3 (SEQ ID NO:580) sequence provides support for the deduced sequence of this variant protein according to the present invention).

TABLE 237
Nucleic acid SNPs

| SNP position on nucleotide | Alternative | Previously |
|---|---|---|
| sequence | nucleic acid | known SNP? |
| 105 | T -> C | Yes |
| 208 | T -> | No |
| 349 | G -> T | Yes |
| 459 | C -> A | No |

[2013] Variant protein Z36249_PEA_{—}3_P4 (SEQ ID NO:581) according to the present invention has an amino acid sequence; it is encoded by transcript(s) Z36249_PEA_{—}3_T5 (SEQ ID NO:566). One or more alignments to one or more previously published protein sequences are in the alignment table located on the attached CDROM. A brief description of the relationship of the variant protein according to the present invention to each such aligned protein is as follows:

[2014] Comparison Report Between Z36249_PEA_{—}3_P4 (SEQ ID NO:581) and Q96LE7:

[2015] 1. An isolated chimeric polypeptide encoding for Z36249_PEA_{—}3_P4 (SEQ ID NO:581), comprising a first amino acid sequence being at least 90% homologous to MMVLKVEELVTGKKNGNGEAGEFLPEDFRDGEYEAAVTLEKQEDLKTLLAHPVTLGEQQWKSE KQREAELKKKKLEQRSKLENLEDLEIIIQLKKRKKYRKTKVPVVKEPEPEIITEPVDVPTFLKAALE NKLPVVEKFLSDKNNPDVCDE corresponding to amino acids 1-151 of Q96LE7, which also corresponds to amino acids 1-151 of Z36249_PEA_{—}3_P4 (SEQ ID NO:581), and a second amino acid sequence being at least 70%, optionally at least 80%, preferably at least 85%, more preferably at least 90% and most preferably at least 95% homologous to a polypeptide having the sequence VRLMQSTAKSSSLILCFLCFTPVLLI (SEQ ID NO: 666) corresponding to amino acids 152-177 of Z36249_PEA_{—}3_P4 (SEQ ID NO:581), wherein said first amino acid sequence and second amino acid sequence are contiguous and in a sequential order.

[2016] 2. An isolated polypeptide encoding for a tail of Z36249_PEA_{—}3_P4 (SEQ ID NO:581), comprising a polypeptide being at least 70%, optionally at least about 80%, preferably at least about 85%, more preferably at least about 90% and most preferably at least about 95% homologous to the sequence VRLMQSTAKSSSLILCFLCFTPVLLI (SEQ ID NO: 666) in Z36249_PEA_{—}3_P4 (SEQ ID NO:581).

[2017] Comparison Report Between Z36249_PEA_{—}3_P4 (SEQ ID NO:581) and Q15327:

[2018] 1. An isolated chimeric polypeptide encoding for Z36249_PEA_{—}3_P4 (SEQ ID NO:581), comprising a first amino acid sequence being at least 90% homologous to MMVLKVEELVTGKKNGNGEAGEFLPEDFRDGEYEAAVTLEKQEDLKTLLAHPVTLGEQQWKSE KQREAEL corresponding to amino acids 1-70 of Q15327, which also corresponds to amino acids 1-70 of Z36249_PEA_{—}3_P4 (SEQ ID NO:581), a bridging amino acid K corresponding to amino acid 71 of Z36249_PEA_{—}3_P4 (SEQ ID NO:581), a second amino acid sequence being at least 90% homologous to KKKLEQRSKLENLEDLEIIIQLKKRKKYRKTKVPVVKEPEPEIITEPVDVPTFLKAALENKLPVVEKF LSDKNNPDVCDE corresponding to amino acids 72-151 of Q15327, which also corresponds to amino acids 72-151 of Z36249_PEA_{—}3_P4 (SEQ ID NO:581), and a third amino acid sequence being at least 70%, optionally at least 80%, preferably at least 85%, more preferably at least 90% and most preferably at least 95% homologous to a polypeptide having the sequence VRLMQSTAKSSSLILCFLCFTPVLLI (SEQ ID NO: 666) corresponding to amino acids 152-177 of Z36249_PEA_{—}3_P4 (SEQ ID NO:581), wherein said first amino acid sequence, bridging amino acid, second amino acid sequence and third amino acid sequence are contiguous and in a sequential order.

[2019] 2. An isolated polypeptide encoding for a tail of Z36249_PEA_{—}3_P4 (SEQ ID NO:581), comprising a polypeptide being at least 70%, optionally at least about 80%, preferably at least about 85%, more preferably at least about 90% and most preferably at least about 95% homologous to the sequence VRLMQSTAKSSSLILCFLCFTPVLLI (SEQ ID NO: 666) in Z36249_PEA_{—}3_P4 (SEQ ID NO:581).

[2020] The location of the variant protein was determined according to results from a number of different software programs and analyses, including analyses from SignalP and other specialized programs. The variant protein is believed to be located as follows with regard to the cell: intracellularly. The protein localization is believed to be intracellularly because only one of the two trans-membrane region prediction programs (Tmpred: 1, Tmhmm: 0) has predicted that this protein has a trans-membrane region. In addition both signal-peptide prediction programs predict that this protein is a non-secreted protein.

[2021] Variant protein Z36249_PEA_{—}3_P4 (SEQ ID NO:581) also has the following non-silent SNPs (Single Nucleotide Polymorphisms) as listed in Table 238, (given according to their position(s) on the amino acid sequence, with the alternative amino acid(s) listed; the last column indicates whether the SNP is known or not; the presence of known SNPs in variant protein Z36249_PEA_{—}3_P4 (SEQ ID NO:581) sequence provides support for the deduced sequence of this variant protein according to the present invention).

TABLE 238
Amino acid mutations

| SNP position(s) on amino acid | Alternative | Previously |
|---|---|---|
| sequence | amino acid(s) | known SNP? |
| 34 | E -> * | Yes |

[2022] Variant protein Z36249_PEA_{—}3_P4 (SEQ ID NO:581) is encoded by the following transcript(s): Z36249_PEA_{—}3_T5 (SEQ ID NO:566). The coding portion of transcript Z36249_PEA_{—}3_T5 (SEQ ID NO:566) starts at position 250 and ends at position 780. The transcript also has the following SNPs as listed in Table 239 (given according to their position on the nucleotide sequence, with the alternative nucleic acid listed; the last column indicates whether the SNP is known or not; the presence of known SNPs in variant protein Z36249_PEA_{—}3_P4 (SEQ ID NO:581) sequence provides support for the deduced sequence of this variant protein according to the present invention).

TABLE 239
Nucleic acid SNPs

| SNP position on nucleotide | Alternative | Previously |
|---|---|---|
| sequence | nucleic acid | known SNP? |
| 105 | T -> C | Yes |
| 208 | T -> | No |
| 349 | G -> T | Yes |
| 459 | C -> A | No |
| 1265 | T -> C | Yes |

[2023] Variant protein Z36249_PEA_{—}3_P5 (SEQ ID NO:582) according to the present invention has an amino acid sequence; it is encoded by transcript(s) Z36249_PEA_{—}3_T9 (SEQ ID NO:567). One or more alignments to one or more previously published protein sequences are in the alignment table located on the attached CDROM. A brief description of the relationship of the variant protein according to the present invention to each such aligned protein is as follows:

[2024] Comparison Report Between Z36249_PEA_{—}3_P5 (SEQ ID NO:582) and Q96LE7:

[2025] 1. An isolated chimeric polypeptide encoding for Z36249_PEA_{—}3_P5 (SEQ ID NO:582), comprising a first amino acid sequence being at least 90% homologous to MMVLKVEELVTGKKNGNGEAGEFLPEDFRDGEYEAAVTLEKQEDLKTLLAHPVTLGEQQWKSE KQREAELKKKKLEQRSKLENLEDLEIIIQLKKRKKYRKTKVPVVKEPEPEIITEPVDVPTFLKAALE NKLPVVEKFLSDKNNPDVCDE corresponding to amino acids 1-151 of Q96LE7, which also corresponds to amino acids 1-151 of Z36249_PEA_{—}3_P5 (SEQ ID NO:582), and a second amino acid sequence being at least 90% homologous to LESTAIHWASRGGNLDVLKLLLNKGAKISARDKLLSTALHVAVRTGHYECAEHLIACEADLNAKD REGDTPLHDAVRLNRYKMIRLLIMYGADLNIKNCAGKTPMDLVLHWQNGTKAIFDSLRENSYKTS RIATF corresponding to amino acids 185-319 of Q96LE7, which also corresponds to amino acids 152-286 of Z36249_PEA_{—}3_P5 (SEQ ID NO:582), wherein said first amino acid sequence and second amino acid sequence are contiguous and in a sequential order.

[2026] 2. An isolated chimeric polypeptide encoding for an edge portion of Z36249_PEA_{—}3_P5 (SEQ ID NO:582), comprising a polypeptide having a length “n”, wherein n is at least about 10 amino acids in length, optionally at least about 20 amino acids in length, preferably at least about 30 amino acids in length, more preferably at least about 40 amino acids in length and most preferably at least about 50 amino acids in length, wherein at least two amino acids comprise EL, having a structure as follows: a sequence starting from any of amino acid numbers 151−x to 151; and ending at any of amino acid numbers 152+((n−2)−x), in which x varies from 0 to n−2.

[2027] Comparison Report Between Z36249_PEA_{—}3_P5 (SEQ ID NO:582) and Q15327:

[2028] 1. An isolated chimeric polypeptide encoding for Z36249_PEA_{—}3_P5 (SEQ ID NO:582), comprising a first amino acid sequence being at least 90% homologous to MMVLKVEELVTGKKNGNGEAGEFLPEDFRDGEYEAAVTLEKQEDLKTLLAHPVTLGEQQWKSE KQREAEL corresponding to amino acids 1-70 of Q15327, which also corresponds to amino acids 1-70 of Z36249_PEA_{—}3_P5 (SEQ ID NO:582), a bridging amino acid K corresponding to amino acid 71 of Z36249_PEA_{—}3_P5 (SEQ ID NO:582), a second amino acid sequence being at least 90% homologous to KKKLEQRSKLENLEDLEIIIQLKKRKKYRKTKVPVVKEPEPEIITEPVDVPTFLKAALENKLPVVEKF LSDKNNPDVCDE corresponding to amino acids 72-151 of Q15327, which also corresponds to amino acids 72-151 of Z36249_PEA_{—}3_P5 (SEQ ID NO:582), and a third amino acid sequence being at least 90% homologous to LESTAIHWASRGGNLDVLKLLLNKGAKISARDKLLSTALHVAVRTGHYECAEHLIACEADLNAKD REGDTPLHDAVRLNRYKMIRLLIMYGADLNIKNCAGKTPMDLVLHWQNGTKAIFDSLRENSYKTS RIATF corresponding to amino acids 185-319 of Q15327, which also corresponds to amino acids 152-286 of Z36249_PEA_{—}3_P5 (SEQ ID NO:582), wherein said first amino acid sequence, bridging amino acid, second amino acid sequence and third amino acid sequence are contiguous and in a sequential order.

[2029] 2. An isolated chimeric polypeptide encoding for an edge portion of Z36249_PEA_{—}3_P5 (SEQ ID NO:582), comprising a polypeptide having a length “n”, wherein n is at least about 10 amino acids in length, optionally at least about 20 amino acids in length, preferably at least about 30 amino acids in length, more preferably at least about 40 amino acids in length and most preferably at least about 50 amino acids in length, wherein at least two amino acids comprise EL, having a structure as follows: a sequence starting from any of amino acid numbers 151−x to 151; and ending at any of amino acid numbers 152+((n−2)−x), in which x varies from 0 to n−2.

[2030] The location of the variant protein was determined according to results from a number of different software programs and analyses, including analyses from SignalP and other specialized programs. The variant protein is believed to be located as follows with regard to the cell: intracellularly. The protein localization is believed to be intracellularly because neither of the trans-membrane region prediction programs predicted a trans-membrane region for this protein. In addition both signal-peptide prediction programs predict that this protein is a non-secreted protein.

[2031] Variant protein Z36249_PEA_{—}3_P5 (SEQ ID NO:582) also has the following non-silent SNPs (Single Nucleotide Polymorphisms) as listed in Table 240, (given according to their position(s) on the amino acid sequence, with the alternative amino acid(s) listed; the last column indicates whether the SNP is known or not; the presence of known SNPs in variant protein Z36249_PEA_{—}3_P5 (SEQ ID NO:582) sequence provides support for the deduced sequence of this variant protein according to the present invention).

TABLE 240
Amino acid mutations

| SNP position(s) on amino acid | Alternative | Previously |
|---|---|---|
| sequence | amino acid(s) | known SNP? |
| 34 | E -> * | Yes |

[2032] Variant protein Z36249_PEA_{—}3_P5 (SEQ ID NO:582) is encoded by the following transcript(s): Z36249_PEA_{—}3_T9 (SEQ ID NO:567). The coding portion of transcript Z36249_PEA_{—}3_T9 (SEQ ID NO:567) starts at position 250 and ends at position 1107. The transcript also has the following SNPs as listed in Table 241 (given according to their position on the nucleotide sequence, with the alternative nucleic acid listed; the last column indicates whether the SNP is known or not; the presence of known SNPs in variant protein Z36249_PEA_{—}3_P5 (SEQ ID NO:582) sequence provides support for the deduced sequence of this variant protein according to the present invention).

TABLE 241
Nucleic acid SNPs

| SNP position on nucleotide | Alternative | Previously |
|---|---|---|
| sequence | nucleic acid | known SNP? |
| 105 | T -> C | Yes |
| 208 | T -> | No |
| 349 | G -> T | Yes |
| 459 | C -> A | No |
| 1169 | A -> G | Yes |
| 1365 | C -> T | Yes |
| 1426 | C -> T | Yes |
| 1525 | C -> T | Yes |
| 1610 | C -> T | Yes |
| 1714 | G -> A | Yes |
| 1770 | G -> A | Yes |

[2033] Table 242 below describes the starting and ending position of Z36249_PEA_{—}3_node_{—}11 (SEQ ID NO:571) on the relevant transcript. Experimental results for this segment are described below.

TABLE 242
Segment location on transcripts

| | Segment | Segment |
|---|---|---|
| Transcript name | starting position | ending position |
| Z36249_PEA_3_T5 | 703 | 1387 |
| (SEQ ID NO: 566) | | |

[2034] Table 243 below describes the starting and ending position of Z36249_PEA_{—}3_node_{—}14 (SEQ ID NO:572) on the relevant transcript. Experimental results for this segment are described below.

TABLE 243
Segment location on transcripts

| | Segment | Segment |
|---|---|---|
| Transcript name | starting position | ending position |
| Z36249_PEA_3_T3 | 802 | 1472 |
| (SEQ ID NO: 565) | | |

[2035] Table 244 below describes the starting and ending position of Z36249_PEA_{—}3_node_{—}10 (SEQ ID NO:574) on each of the relevant transcripts. Experimental results for this segment are described below.

TABLE 244
Segment location on transcripts

| | | Segment |
|---|---|---|
| | Segment | ending |
| Transcript name | starting position | position |
| Z36249_PEA_3_T3 (SEQ ID NO: 565) | 595 | 702 |
| Z36249_PEA_3_T5 (SEQ ID NO: 566) | 595 | 702 |
| Z36249_PEA_3_T9 (SEQ ID NO: 567) | 595 | 702 |

[2036] Table 245 below describes the starting and ending position of Z36249_PEA_{—}3_node_{—}13 (SEQ ID NO:575) on each of the relevant transcripts. Experimental results for this segment are described below.

TABLE 245
Segment location on transcripts

| | | Segment |
|---|---|---|
| | Segment | ending |
| Transcript name | starting position | position |
| Z36249_PEA_3_T2 (SEQ ID NO: 564) | 595 | 693 |
| Z36249_PEA_3_T3 (SEQ ID NO: 565) | 703 | 801 |

Expression of Homo sapiens ankyrin repeat domain 1 (cardiac muscle) Z36249 transcripts which are detectable by amplicon as depicted in sequence name Z36249 seg11-12 (SEQ ID NO:585) specifically in heart tissue

[2037] Expression of Homo sapiens ankyrin repeat domain 1 (cardiac muscle) transcripts detectable by or according to seg11-12 node, Z36249 seg11-12 (SEQ ID NO:585) amplicon and primers Z36249 seg11-12F (SEQ ID NO:583) and Z36249 seg11-12R (SEQ ID NO:584) was measured by real time PCR. In parallel the expression of four housekeeping genes—RPL19 (GenBank Accession No. NM_{—}000981 (SEQ ID NO:7); RPL19 amplicon (SEQ ID NO: 38)), TATA box (GenBank Accession No. NM_{—}003194 (SEQ ID NO:2); TATA amplicon (SEQ ID NO: 53)), Ubiquitin (GenBank Accession No. BC000449 (SEQ ID NO:9); amplicon—Ubiquitin-amplicon (SEQ ID NO:50)) and SDHA (GenBank Accession No. NM_{—}004168 (SEQ ID NO:4); amplicon—SDHA-amplicon (SEQ ID NO:29)), was measured similarly. For each RT sample, the expression of the above amplicons was normalized to the geometric mean of the quantities of the housekeeping genes. The normalized quantity of each RT sample was then divided by the median of the quantities of the heart samples (Sample Nos. 44-46, Table 7, above, “Tissue samples in normal panel”), to obtain a value of relative expression for each sample relative to median of the heart samples.

[2038] FIG. 87 is a histogram showing relative expression of the above-indicated Homo sapiens ankyrin repeat domain 1 (cardiac muscle) transcripts in heart tissue samples as opposed to other tissues.

[2039] As is evident from FIG. 87, the expression of Homo sapiens ankyrin repeat domain 1 (cardiac muscle) transcripts detectable by the above amplicon in heart tissue samples was significantly higher than in the other samples (Sample Nos. 1-43, 47-78 Table 7, “Tissue samples in normal panel).

[2040] Primer pairs are also optionally and preferably encompassed within the present invention; for example, for the above experiment, the following primer pair was used as a non-limiting illustrative example only of a suitable primer pair: Z36249 seg11-12F (SEQ ID NO:583) forward primer; and Z36249 seg11-12R (SEQ ID NO:584) reverse primer.

[2041] The present invention also preferably encompasses any amplicon obtained through the use of any suitable primer pair; for example, for the above experiment, the following amplicon was obtained as a non-limiting illustrative example only of a suitable amplicon: Z36249 seg11-12 (SEQ ID NO:585).

[2042] Primers:

| | |
|---|---|
| Forward primer Z36249 seg11-12F: | (SEQ ID NO: 583) |
| GCTCTGGAGAATAAACTGCCAGTAG | |
| Reverse primer Z36249 seg11-12R: | (SEQ ID NO: 584) |
| TATTAGCAAGACTGGAGTAAAGCATAAG | |
| Amplicon Z36249 seg11-12: | (SEQ ID NO: 585) |

GCTCTGGAGAATAAACTGCCAGTAGTAGAAAAATTCTTGTCAGACAAGAACAATCCAGATGTT
TGTGATGAGGTAAGACTCATGCAAAGCACTGCAAAATCCAGCTCATTAATTTTATGTTTCTTAT
GCTTTACTCCAGTCTTGCTAATA

[2043] The table below provides the conversion names for the primers and amplicons used herein.

| | Location in POS3 (Description for |
|---|---|
| Primers/amplicon names | cluster Z36249 section above) |
| Z36249 seg 11-12 (SEQ ID NO: 585) | seg10-11 |

Expression of Homo sapiens ankyrin repeat domain 1 (cardiac muscle) Z36249 transcripts which are detectable by amplicon as depicted in sequence name Z36249 seg14-16 (SEQ ID NO:588) specifically in heart tissue:

[2044] Expression of Homo sapiens ankyrin repeat domain 1 (cardiac muscle) transcripts detectable by or according to seg14-16 node, Z36249 seg14-16 (SEQ ID NO:588) amplicon and primers Z36249 seg14-16F (SEQ ID NO:586) and Z36249 seg14-16R (SEQ ID NO:587) was measured by real time PCR. In parallel the expression of four housekeeping genes—RPL19 (GenBank Accession No. NM_{—}000981 (SEQ ID NO:7); RPL19 amplicon (SEQ ID NO: 38)), TATA box (GenBank Accession No. NM_{—}003194 (SEQ ID NO:2); TATA amplicon (SEQ ID NO: 53)), Ubiquitin (GenBank Accession No. BC000449 (SEQ ID NO:9); amplicon—Ubiquitin-amplicon (SEQ ID NO:50)) and SDHA (GenBank Accession No. NM_{—}004168 (SEQ ID NO:4); amplicon—SDHA-amplicon (SEQ ID NO:29)), was measured similarly. For each RT sample, the expression of the above amplicons was normalized to the geometric mean of the quantities of the housekeeping genes. The normalized quantity of each RT sample was then divided by the median of the quantities of the heart samples (Sample Nos. 44-46, Table 7, above, “Tissue samples in normal panel), to obtain a value of relative expression for each sample relative to median of the heart samples.

[2045] FIG. 88 is a histogram showing relative expression of the above-indicated Homo sapiens ankyrin repeat domain 1 (cardiac muscle) transcripts in heart tissue samples as opposed to other tissues.

[2046] As is evident from FIG. 88, the expression of Homo sapiens ankyrin repeat domain 1 (cardiac muscle) transcripts detectable by the above amplicon in heart tissue samples was significantly higher than in the other samples (Sample Nos. 1-43, 47-78 Table 7, “Tissue samples in normal panel).

[2047] Primer pairs are also optionally and preferably encompassed within the present invention; for example, for the above experiment, the following primer pair was used as a non-limiting illustrative example only of a suitable primer pair: Z36249 seg14-16F (SEQ ID NO:586) forward primer; and Z36249 seg14-16R (SEQ ID NO:587) reverse primer.

[2048] The present invention also preferably encompasses any amplicon obtained through the use of any suitable primer pair; for example, for the above experiment, the following amplicon was obtained as a non-limiting illustrative example only of a suitable amplicon: Z36249 seg14-16 (SEQ ID NO:588).

[2049] Primers:

| | |
|---|---|
| Forward primer Z36249 seg14-16F: | (SEQ ID NO: 586) |
| GCTTGGAAGGACATTTGGCA | |
| Reverse primer Z36249 seg14-16R: | (SEQ ID NO: 587) |
| TGGCTCATTCCCAAGCAAAG | |
| Amplicon Z36249 seg14-16: | (SEQ ID NO: 588) |

GCTTGGAAGGACATTTGGCAATTGTGGAGAAGTTAATGGAAGCTGGAGCCCAGATCGAATTC
CGTGATATGGTAAATATATTTCTTTGCTTGGGAATGAGCCA

[2050] The table below provides the conversion names for the primers and amplicons used herein.

| | Location in POS3 (Description for |
|---|---|
| Primers/amplicon names | cluster Z36249 section above) |
| Z36249 seg 14-16 (SEQ ID NO: 588) | seg13-14 |

Expression of Homo sapiens ankyrin repeat domain 1 (cardiac muscle) Z36249 transcripts which are detectable by amplicon as depicted in sequence name Z36249 junc23-25 (SEQ ID NO:591) specifically in heart tissue:

[2051] Expression of Homo sapiens ankyrin repeat domain 1 (cardiac muscle) transcripts detectable by or according to junc23-25, Z36249 junc23-25 (SEQ ID NO:591) amplicon and primers Z36249 junc23-25F2 (SEQ ID NO:589) and Z36249 junc23-25R2 (SEQ ID NO:590) was measured by real time PCR. In parallel the expression of four housekeeping genes—RPL19 (GenBank Accession No. NM_{—}000981 (SEQ ID NO:7); RPL19 amplicon (SEQ ID NO: 38)), TATA box (GenBank Accession No. NM_{—}003194 (SEQ ID NO:2); TATA amplicon (SEQ ID NO: 53)), Ubiquitin (GenBank Accession No. BC000449 (SEQ ID NO:9); amplicon—Ubiquitin-amplicon (SEQ ID NO:50)) and SDHA (GenBank Accession No. NM_{—}004168 (SEQ ID NO:4); amplicon—SDHA-amplicon (SEQ ID NO:29)), was measured similarly. For each RT sample, the expression of the above amplicons was normalized to the geometric mean of the quantities of the housekeeping genes. The normalized quantity of each RT sample was then divided by the median of the quantities of the heart samples (Sample Nos. 44-46, Table 7, above, “Tissue samples in normal panel), to obtain a value of relative expression for each sample relative to median of the heart samples.

[2052] FIG. 89 is a histogram showing relative expression of the above-indicated Homo sapiens ankyrin repeat domain 1 (cardiac muscle) transcripts in heart tissue samples as opposed to other tissues.

[2053] As is evident from FIG. 89, the expression of Homo sapiens ankyrin repeat domain 1 (cardiac muscle) transcripts detectable by the above amplicon in heart tissue samples was significantly higher than in the other samples (Sample Nos. 1-43, 47-78, Table 7, “Tissue samples in normal panel).

[2054] Primer pairs are also optionally and preferably encompassed within the present invention; for example, for the above experiment, the following primer pair was used as a non-limiting illustrative example only of a suitable primer pair: Z36249 junc23-25F2 (SEQ ID NO:589) forward primer; and Z36249 junc23-25R2 (SEQ ID NO: 590) reverse primer.

[2055] The present invention also preferably encompasses any amplicon obtained through the use of any suitable primer pair; for example, for the above experiment, the following amplicon was obtained as a non-limiting illustrative example only of a suitable amplicon: Z36249 junc23-25F2R2 (SEQ ID NO: 591).

[2056] Primers:

| | |
|---|---|
| Forward primer Z36249 junc23-25F2- | (SEQ ID NO: 589) |
| CAGCGCTGCATGTGGC | |
| Reverse primer Z36249 junc23-25R2- | (SEQ ID NO: 590) |
| CAACGGGGTATCTCCTTCTCTG | |
| Amplicon Z36249 junc23-25F2R2- | (SEQ ID NO: 591) |

CAGCGCTGCATGTGGCGGTGAGGACTGGCCACTATGAGTGCGCGGAGCATCTTATCGCCTGTG
AGGCAGACCTCAACGCCAAAGACAGAGAAGGAGATACCCCGTTG

[2057] The table below provides the conversion names for the primers and amplicons used herein.

| | Location in POS3 (Description for |
|---|---|
| Primers/amplicon names | cluster Z36249 section above) |
| Z36249 junc 23-25F2R2 (SEQ | Junc 19-21 |
| ID NO: 591) | |

### Description for Cluster M78530

[2058] Cluster M78530 features 3 transcript(s) and 21 segment(s) of interest, the names for which are given in Tables 246 and 247, respectively. The selected protein variants are given in table 248.

TABLE 246
Transcripts of interest
Transcript Name

M78530_PEA_1_T11 (SEQ ID NO: 592)
M78530_PEA_1_T12 (SEQ ID NO: 593)
M78530_PEA_1_T13 (SEQ ID NO: 594)

TABLE 247
Segments of interest

| Segment Name | |
|---|---|
| M78530_PEA_1_node_0 (SEQ ID NO: 595) | M78530_PEA_1_T11 (SEQ ID NO: 592), |
| | M78530_PEA_1_T12 (SEQ ID NO: 593) and |
| | M78530_PEA_1_T13 (SEQ ID NO: 594) |
| M78530_PEA_1_node_15 (SEQ ID NO: 596) | M78530_PEA_1_T11 (SEQ ID NO: 592), |
| | M78530_PEA_1_T12 (SEQ ID NO: 593) and |
| | M78530_PEA_1_T13 (SEQ ID NO: 594) |
| M78530_PEA_1_node_16 (SEQ ID NO: 597) | M78530_PEA_1_T13 (SEQ ID NO: 594) |
| M78530_PEA_1_node_19 (SEQ ID NO: 598) | M78530_PEA_1_T12 (SEQ ID NO: 593) |
| M78530_PEA_1_node_21 (SEQ ID NO: 599) | M78530_PEA_1_T11 (SEQ ID NO: 592) |
| M78530_PEA_1_node_23 (SEQ ID NO: 600) | M78530_PEA_1_T11 (SEQ ID NO: 592) |
| M78530_PEA_1_node_27 (SEQ ID NO: 601) | M78530_PEA_1_T11 (SEQ ID NO: 592) |
| M78530_PEA_1_node_29 (SEQ ID NO: 602) | M78530_PEA_1_T11 (SEQ ID NO: 592) |
| M78530_PEA_1_node_36 (SEQ ID NO: 603) | M78530_PEA_1_T11 (SEQ ID NO: 592) |
| M78530_PEA_1_node_37 (SEQ ID NO: 604) | M78530_PEA_1_T11 (SEQ ID NO: 592) |
| M78530_PEA_1_node_2 (SEQ ID NO: 605) | M78530_PEA_1_T11 (SEQ ID NO: 592), |
| | M78530_PEA_1_T12 (SEQ ID NO: 593) and |
| | M78530_PEA_1_T13 (SEQ ID NO: 594) |
| M78530_PEA_1_node_4 (SEQ ID NO: 606) | M78530_PEA_1_T11 (SEQ ID NO: 592), |
| | M78530_PEA_1_T12 (SEQ ID NO: 593) and |
| | M78530_PEA_1_T13 (SEQ ID NO: 594) |
| M78530_PEA_1_node_5 (SEQ ID NO: 607) | M78530_PEA_1_T11 (SEQ ID NO: 592), |
| | M78530_PEA_1_T12 (SEQ ID NO: 593) and |
| | M78530_PEA_1_T13 (SEQ ID NO: 594) |
| M78530_PEA_1_node_7 (SEQ ID NO: 608) | M78530_PEA_1_T11 (SEQ ID NO: 592), |
| | M78530_PEA_1_T12 (SEQ ID NO: 593) and |
| | M78530_PEA_1_T13 (SEQ ID NO: 594) |
| M78530_PEA_1_node_9 (SEQ ID NO: 609) | M78530_PEA_1_T11 (SEQ ID NO: 592), |
| | M78530_PEA_1_T12 (SEQ ID NO: 593) and |
| | M78530_PEA_1_T13 (SEQ ID NO: 594) |
| M78530_PEA_1_node_10 (SEQ ID NO: 610) | M78530_PEA_1_T11 (SEQ ID NO: 592), |
| | M78530_PEA_1_T12 (SEQ ID NO: 593) and |
| | M78530_PEA_1_T13 (SEQ ID NO: 594) |
| M78530_PEA_1_node_18 (SEQ ID NO: 611) | M78530_PEA_1_T11 (SEQ ID NO: 592) and |
| | M78530_PEA_1_T12 (SEQ ID NO: 593) |
| M78530_PEA_1_node_25 (SEQ ID NO: 612) | M78530_PEA_1_T11 (SEQ ID NO: 592) |
| M78530_PEA_1_node_30 (SEQ ID NO: 613) | M78530_PEA_1_T11 (SEQ ID NO: 592) |
| M78530_PEA_1_node_33 (SEQ ID NO: 614) | M78530_PEA_1_T11 (SEQ ID NO: 592) |
| M78530_PEA_1_node_34 (SEQ ID NO: 615) | M78530_PEA_1_T11 (SEQ ID NO: 592) |

TABLE 248
Proteins of interest

| Protein Name | Corresponding Transcript(s) |
|---|---|
| M78530_PEA_1_P15 (SEQ ID | M78530_PEA_1_T11 (SEQ ID |
| NO: 619) | NO: 592) |
| M78530_PEA_1_P16 (SEQ ID | M78530_PEA_1_T12 (SEQ ID |
| NO: 620) | NO: 593) |
| M78530_PEA_1_P17 (SEQ ID | M78530_PEA_1_T13 (SEQ ID |
| NO: 621) | NO: 594) |

[2059] Cluster M78530 can be used as a diagnostic marker according to overexpression of transcripts of this cluster in cancer. Expression of such transcripts in normal tissues is also given according to the previously described methods. The term “number” in the left hand column of the table and the numbers on the y-axis of FIG. 90 refer to weighted expression of ESTs in each category, as “parts per million” (ratio of the expression of ESTs for a particular cluster to the expression of all ESTs in that category, according to parts per million).

[2060] Overall, the following results were obtained as shown with regard to the histograms in FIG. 90 and Table 249. This cluster is overexpressed (at least at a minimum level) in the following pathological conditions: ovarian carcinoma. P values and ratios for expression in cancerous tissue are described in table 250.

TABLE 249
Normal tissue distribution

| Name of Tissue | Number |
|---|---|
| Adrenal | 40 |
| Bladder | 41 |
| Brain | 52 |
| Colon | 126 |
| Epithelial | 51 |
| General | 35 |
| Kidney | 199 |
| Lung | 63 |
| Breast | 0 |
| Ovary | 0 |
| Pancreas | 20 |
| Prostate | 28 |
| Stomach | 0 |
| Uterus | 113 |

TABLE 250
P values and ratios for expression in cancerous tissue

| Name of Tissue | P1 | P2 | SP1 | R3 | SP2 | R4 |
|---|---|---|---|---|---|---|
| adrenal | 6.4e−01 | 6.9e−01 | 7.1e−01 | 1.1 | 7.8e−01 | 0.9 |
| bladder | 3.3e−01 | 4.5e−01 | 2.8e−01 | 2.0 | 4.9e−01 | 1.4 |
| brain | 7.9e−01 | 8.1e−01 | 8.5e−01 | 0.6 | 9.8e−01 | 0.4 |
| colon | 4.7e−01 | 6.1e−01 | 9.7e−01 | 0.5 | 9.9e−01 | 0.4 |
| epithelial | 2.0e−01 | 8.2e−01 | 3.3e−01 | 1.6 | 2.5e−01 | 0.9 |
| general | 1.3e−01 | 8.5e−01 | 7.4e−01 | 2.2 | 6.0e−04 | 1.4 |
| kidney | 7.0e−01 | 7.6e−01 | 1 | 0.2 | 1 | 0.1 |
| lung | 8.6e−01 | 9.1e−01 | 1 | 0.3 | 1 | 0.3 |
| breast | 1.9e−01 | 2.8e−01 | 3.3e−01 | 2.4 | 5.6e−01 | 1.6 |
| ovary | 1.6e−02 | 1.3e−02 | 7.0e−05 | 10.3 | 6.3e−06 | 9.3 |
| pancreas | 2.6e−01 | 4.1e−01 | 3.5e−02 | 2.2 | 1.2e−01 | 1.5 |
| prostate | 7.9e−01 | 8.6e−01 | 4.7e−01 | 1.2 | 6.3e−01 | 1.0 |
| stomach | 1.1e−01 | 4.5e−01 | 5.0e−01 | 2.2 | 8.0e−01 | 1.3 |
| uterus | 5.3e−01 | 8.2e−01 | 2.4e−01 | 1.0 | 7.7e−01 | 0.6 |

For this cluster, at least one oligonucleotide was found to demonstrate overexpression of the cluster,

[2061] For this cluster, at least one oligonucleotide was found to demonstrate overexpression of the cluster, although not of at least one transcript/segment as listed below. Microarray (chip) data is also available for this cluster as follows. Various oligonucleotides were tested for being differentially expressed in various disease conditions, particularly cancer, as previously described. The following oligonucleotides were found to hit this cluster but not other segments/transcripts below (in relation to ovarian cancer), shown in Table 251.

TABLE 251
Oligonucleotides related to this cluster

| | Overexpressed | Chip |
|---|---|---|
| Oligonucleotide name | in cancers | reference |
| M78530_0_6_0 (SEQ ID NO: 12) | ovarian carcinoma | OVA |

[2062] The sequence for M78530_{—}0_{—}6_{—}0 (SEQ ID NO:12) is as follows: CTTCCTACACACATCTAGACGTTCAAGTTTGCAAATCAGTTTTTAGCAAG.

[2063] As noted above, cluster M78530 features 3 transcript(s), which were listed in Table 246 above. A description of each variant protein according to the present invention is now provided.

[2064] Variant protein M78530_PEA_{—}1_P15 (SEQ ID NO:619) according to the present invention has an amino acid sequence; it is encoded by transcript(s) M78530_PEA_{—}1_T11 (SEQ ID NO:592). One or more alignments to one or more previously published protein sequences are in the alignment table located on the attached CDROM. A brief description of the relationship of the variant protein according to the present invention to each such aligned protein is as follows:

[2065] Comparison Report Between M78530_PEA_{—}1_P15 (SEQ ID NO:619) and Q9HCB6 (SEQ ID NO:617):

[2066] 1. An isolated chimeric polypeptide encoding for M78530_PEA_{—}1_P15 (SEQ ID NO:619), comprising a first amino acid sequence being at least 90% homologous to MRLSPAPLKLSRTPALLALALPLAAALAFSDETLDKVPKSEGYCSRILRAQGTRREGYTEFSLRVEG DPDFYKPGTSYRVTLSAAPPSYFRGFTLIALRENREGDKEEDHAGTFQIIDEEETQFMSNCPVAVTE STPRRRTRIQVFWIAPPAGTGCVILKASIVQKRIIYFQDEGSLTKKLCEQDSTFDGVTDKPILDCCAC GTAKYRLTFYGNWSEKTHPKDYPRRANHWSAIIGGSHSKNYVLWEYGGYASEGVKQVAELGSPV KMEEEIRQQSDEVLTVIKAKAQWPAWQPLNVRAAPSAEFSVDRTRHLMSFLTMMGPSPDWNVGL SAEDLCTKECGWVQKVVQDLIPWDAGTDSGVTYESPNKPTIPQEKIRPLTSLDHPQSPFYDPEGGSI TQVARVVIERIARKGEQCNIVPDNVDDIVADLAPEEKDEDDTPETCIYSNWSPWSACSSSTCDKGK RMRQRMLKAQLDLSVPCPDTQDFQPCMGPGCSDEDGSTCTMSEWITWSPCSISCGMGMRSRERY VKQFPEDGSVCTLPTEE corresponding to amino acids 1-544 of Q9HCB6 (SEQ ID NO:617), which also corresponds to amino acids 1-544 of M78530_PEA_{—}1_P15 (SEQ ID NO:619), a bridging amino acid T corresponding to amino acid 545 of M78530_PEA_{—}1_P15 (SEQ ID NO:619), a second amino acid sequence being at least 90% homologous to EKCTVNEECSPSSCLMTEWGEWDECSATCGMGMKKRHRMIKMNPADGSMCKAETSQAEKCMM PECHTIPCLLSPWSEWSDCSVTCGKGMRTRQRMLKSLAELGDCNEDLEQVEKCMLPEC corresponding to amino acids 546-665 of Q9HCB6 (SEQ ID NO:617), which also corresponds to amino acids 546-665 of M78530_PEA_{—}1_P15 (SEQ ID NO:619), and a third amino acid sequence being at least 70%, optionally at least 80%, preferably at least 85%, more preferably at least 90% and most preferably at least 95% homologous to a polypeptide having the sequence RKSWSSSRPITSMFLSPGSPEPASANTARS (SEQ ID NO: 667) corresponding to amino acids 666-695 of M78530_PEA_{—}1_P15 (SEQ ID NO:619), wherein said first amino acid sequence, bridging amino acid, second amino acid sequence and third amino acid sequence are contiguous and in a sequential order.

[2067] 2. An isolated polypeptide encoding for a tail of M78530_PEA_{—}1_P15 (SEQ ID NO:619), comprising a polypeptide being at least 70%, optionally at least about 80%, preferably at least about 85%, more preferably at least about 90% and most preferably at least about 95% homologous to the sequence RKSWSSSRPITSMFLSPGSPEPASANTARS (SEQ ID NO: 667) in M78530_PEA_{—}1_P15 (SEQ ID NO:619).

[2068] Comparison report between M78530_PEA_{—}1_P15 (SEQ ID NO:619) and 094862 (SEQ ID NO:618):

[2069] 1. An isolated chimeric polypeptide encoding for M78530_PEA_{—}1_P15 (SEQ ID NO:619), comprising a first amino acid sequence being at least 70%, optionally at least 80%, preferably at least 85%, more preferably at least 90% and most preferably at least 95% homologous to a polypeptide having the sequence MRLSPAPLKLSRTPALLALALPLAAALAFSDETLDKVPKSEGYCSRILRAQGTRREGYTEFSLRVEG DPDFYKPGTSYRVTLS (SEQ ID NO: 668) corresponding to amino acids 1-83 of M78530_PEA_{—}1_P15 (SEQ ID NO:619), a second amino acid sequence being at least 90% homologous to AAPPSYFRGFTLIALRENREGDKEEDHAGTFQIIDEEETQFMSNCPVAVTESTPRRRTRIQVFWIAPP AGTGCVILKASIVQKRIIYFQDEGSLTKKLCEQDSTFDGVTDKPILDCCACGTAKYRLTFYGNWSE KTHPKDYPRRANHWSAIIGGSHSKNYVLWEYGGYASEGVKQVAELGSPVKMEEEIRQQSDEVLT VIKAKAQWPAWQPLNVRAAPSAEFSVDRTRHLMSFLTMMGPSPDWNVGLSAEDLCTKECGWVQ KVVQDLIPWDAGTDSGVTYESPNKPTIPQEKIRPLTSLDHPQSPFYDPEGGSITQVARVVIERIARKG EQCNIVPDNVDDIVADLAPEEKDEDDTPETCIYSNWSPWSACSSSTCDKGKRMRQRMLKAQLDLS VPCPDTQDFQPCMGPGCSDEDGSTCTMSEWITWSPCSISCGMGMRSRERYVKQFPEDGSVCTLPT EETEKCTVNEECSPSSCLMTEWGEWDECSATCGMGMKKRHRMIKMNPADGSMCKAETSQAEKC MMPECHTIPCLLSPWSEWSDCSVTCGKGMRTRQRMLKSLAELGDCNEDLEQVEKCMLPEC corresponding to amino acids 1-582 of O94862 (SEQ ID NO:618), which also corresponds to amino acids 84-665 of M78530_PEA_{—}1_P15 (SEQ ID NO:619), and a third amino acid sequence being at least 70%, optionally at least 80%, preferably at least 85%, more preferably at least 90% and most preferably at least 95% homologous to a polypeptide having the sequence RKSWSSSRPITSMFLSPGSPEPASANTARS (SEQ ID NO: 667) corresponding to amino acids 666-695 of M78530_PEA_{—}1_P15 (SEQ ID NO:619), wherein said first amino acid sequence, second amino acid sequence and third amino acid sequence are contiguous and in a sequential order.

[2070] 2. An isolated polypeptide encoding for a head of M78530_PEA_{—}1_P15 (SEQ ID NO:619), comprising a polypeptide being at least 70%, optionally at least about 80%, preferably at least about 85%, more preferably at least about 90% and most preferably at least about 95% homologous to the sequence MRLSPAPLKLSRTPALLALALPLAAALAFSDETLDKVPKSEGYCSRILRAQGTRREGYTEFSLRVEG DPDFYKPGTSYRVTLS (SEQ ID NO: 668) of M78530_PEA_{—}1_P15 (SEQ ID NO:619).

[2071] 3. An isolated polypeptide encoding for a tail of M78530_PEA_{—}1_P15 (SEQ ID NO:619), comprising a polypeptide being at least 70%, optionally at least about 80%, preferably at least about 85%, more preferably at least about 90% and most preferably at least about 95% homologous to the sequence RKSWSSSRPITSMFLSPGSPEPASANTARS (SEQ ID NO: 667) in M78530_PEA_{—}1_P15 (SEQ ID NO:619).

[2072] The location of the variant protein was determined according to results from a number of different software programs and analyses, including analyses from SignalP and other specialized programs. The variant protein is believed to be located as follows with regard to the cell: secreted. The protein localization is believed to be secreted because both signal-peptide prediction programs predict that this protein has a signal peptide, and neither trans-membrane region prediction program predicts that this protein has a trans-membrane region.

[2073] Variant protein M78530_PEA_{—}1_P15 (SEQ ID NO:619) also has the following non-silent SNPs (Single Nucleotide Polymorphisms) as listed in Table 252, (given according to their position(s) on the amino acid sequence, with the alternative amino acid(s) listed; the last column indicates whether the SNP is known or not; the presence of known SNPs in variant protein M78530_PEA_{—}1_P15 (SEQ ID NO:619) sequence provides support for the deduced sequence of this variant protein according to the present invention).

TABLE 252
Amino acid mutations

| SNP position(s) on amino | Alternative amino | |
|---|---|---|
| acid sequence | acid(s) | Previously known SNP? |
| 278 | E -> D | No |
| 278 | E -> V | No |

[2074] Variant protein M78530_PEA_{—}1_P15 (SEQ ID NO:619) is encoded by the following transcript(s): M78530_PEA_{—}1_T11 (SEQ ID NO:592). The coding portion of transcript M78530_PEA_{—}1_T11 (SEQ ID NO:592) starts at position 629 and ends at position 2713. The transcript also has the following SNPs as listed in Table 253 (given according to their position on the nucleotide sequence, with the alternative nucleic acid listed; the last column indicates whether the SNP is known or not; the presence of known SNPs in variant protein M78530_PEA_{—}1_P15 (SEQ ID NO:619) sequence provides support for the deduced sequence of this variant protein according to the present invention).

TABLE 253
Nucleic acid SNPs

| SNP position on nucleotide | Alternative | |
|---|---|---|
| sequence | nucleic acid | Previously known SNP? |
| 760 | C -> T | No |
| 1461 | A -> T | No |
| 1462 | G -> T | No |
| 1492 | A -> G | No |

[2075] Variant protein M78530_PEA_{—}1_P16 (SEQ ID NO:620) according to the present invention has an amino acid sequence; it is encoded by transcript(s) M78530_PEA_{—}1_T12 (SEQ ID NO:593). One or more alignments to one or more previously published protein sequences are given in the alignment table located on the attached CDROM. A brief description of the relationship of the variant protein according to the present invention to each such aligned protein is as follows:

[2076] Comparison Report Between M78530_PEA_{—}1_P16 (SEQ ID NO:620) and Q8NCD7 (SEQ ID NO:616):

[2077] 1. An isolated chimeric polypeptide encoding for M78530_PEA_{—}1_P16 (SEQ ID NO:620), comprising a first amino acid sequence being at least 90% homologous to MRLSPAPLKLSRTPALLALALPLAAALAFSDETLDKVPKSEGYCSRILRAQGTRREGYTEFSLRVEG DPDFYKPGTSYRVTLSAAPPSYFRGFTLIALRENREGDKEEDHAGTFQIIDEEETQFMSNCPVAVTE STPRRRTRIQVFWIAPPAGTGCVILKASIVQKRIIYFQDEGSLTKKLCEQDSTFDGVTDKPILDCCAC GTAKYRLTFYGNWSEKTHPKDYPRRANHWSAIIGGSHSKNYVLWEYGGYASEGVKQVAELGSPV KMEEEIRQQSDEVLTVIKAKAQWPAWQPLNV corresponding to amino acids 1-297 of Q8NCD7 (SEQ ID NO:616), which also corresponds to amino acids 1-297 of M78530_PEA_{—}1_P16 (SEQ ID NO:620).

[2078] Comparison Report Between M78530_PEA_{—}1_P16 (SEQ ID NO:620) and Q9HCB6 (SEQ ID NO:617):

[2079] 1. An isolated chimeric polypeptide encoding for M78530_PEA_{—}1_P16 (SEQ ID NO:620), comprising a first amino acid sequence being at least 90% homologous to MRLSPAPLKLSRTPALLALALPLAAALAFSDETLDKVPKSEGYCSRILRAQGTRREGYTEFSLRVEG DPDFYKPGTSYRVTLSAAPPSYFRGFTLIALRENREGDKEEDHAGTFQIIDEEETQFMSNCPVAVTE STPRRRTRIQVFWIAPPAGTGCVILKASIVQKRIIYFQDEGSLTKKLCEQDSTFDGVTDKPILDCCAC GTAKYRLTFYGNWSEKTHPKDYPRRANHWSAIIGGSHSKNYVLWEYGGYASEGVKQVAELGSPV KMEEEIRQQSDEVLTVIKAKAQWPAWQPLNV corresponding to amino acids 1-297 of Q9HCB6 (SEQ ID NO:617), which also corresponds to amino acids 1-297 of M78530_PEA_{—}1_P16 (SEQ ID NO:620).

[2080] Comparison Report Between M78530_PEA_{—}1_P16 (SEQ ID NO:620) and O94862 (SEQ ID NO:618):

[2081] 1. An isolated chimeric polypeptide encoding for M78530_PEA_{—}1_P16 (SEQ ID NO:620), comprising a first amino acid sequence being at least 70%, optionally at least 80%, preferably at least 85%, more preferably at least 90% and most preferably at least 95% homologous to a polypeptide having the sequence MRLSPAPLKLSRTPALLALALPLAAALAFSDETLDKVPKSEGYCSRILRAQGTRREGYTEFSLRVEG DPDFYKPGTSYRVTLS (SEQ ID NO: 668) corresponding to amino acids 1-83 of M78530_PEA_{—}1_P16 (SEQ ID NO:620), and a second amino acid sequence being at least 90% homologous to AAPPSYFRGFTLIALRENREGDKEEDHAGTFQIIDEEETQFMSNCPVAVTESTPRRRTRIQVFWIAPP AGTGCVILKASIVQKRIIYFQDEGSLTKKLCEQDSTFDGVTDKPILDCCACGTAKYRLTFYGNWSE KTHPKDYPRRANHWSAIIGGSHSKNYVLWEYGGYASEGVKQVAELGSPVKMEEEIRQQSDEVLT VIKAKAQWPAWQPLNV corresponding to amino acids 1-214 of O94862 (SEQ ID NO:618), which also corresponds to amino acids 84-297 of M78530_PEA_{—}1_P16 (SEQ ID NO:620), wherein said first amino acid sequence and second amino acid sequence are contiguous and in a sequential order.

[2082] 2. An isolated polypeptide encoding for a head of M78530_PEA_{—}1_P16 (SEQ ID NO:620), comprising a polypeptide being at least 70%, optionally at least about 80%, preferably at least about 85%, more preferably at least about 90% and most preferably at least about 95% homologous to the sequence MRLSPAPLKLSRTPALLALALPLAAALAFSDETLDKVPKSEGYCSRILRAQGTRREGYTEFSLRVEG DPDFYKPGTSYRVTLS (SEQ ID NO: 668) of M78530_PEA_{—}1_P16 (SEQ ID NO:620).

[2083] The location of the variant protein was determined according to results from a number of different software programs and analyses, including analyses from SignalP and other specialized programs. The variant protein is believed to be located as follows with regard to the cell: secreted. The protein localization is believed to be secreted because both signal-peptide prediction programs predict that this protein has a signal peptide, and neither trans-membrane region prediction program predicts that this protein has a trans-membrane region.

[2084] Variant protein M78530_PEA_{—}1_P16 (SEQ ID NO:620) also has the following non-silent SNPs (Single Nucleotide Polymorphisms) as listed in Table 254, (given according to their position(s) on the amino acid sequence, with the alternative amino acid(s) listed; the last column indicates whether the SNP is known or not; the presence of known SNPs in variant protein M78530_PEA_{—}1_P16 (SEQ ID NO:620) sequence provides support for the deduced sequence of this variant protein according to the present invention).

TABLE 254
Amino acid mutations

| SNP position(s) on amino acid | Alternative | |
|---|---|---|
| sequence | amino acid(s) | Previously known SNP? |
| 278 | E -> D | No |
| 278 | E -> V | No |

[2085] Variant protein M78530_PEA_{—}1_P16 (SEQ ID NO:620) is encoded by the following transcript(s): M78530_PEA_{—}1_T12 (SEQ ID NO:593). The coding portion of transcript M78530_PEA_{—}1_T12 (SEQ ID NO:593) starts at position 629 and ends at position 1519. The transcript also has the following SNPs as listed in Table 255 (given according to their position on the nucleotide sequence, with the alternative nucleic acid listed; the last column indicates whether the SNP is known or not; the presence of known SNPs in variant protein M78530_PEA_{—}1_P16 (SEQ ID NO:620) sequence provides support for the deduced sequence of this variant protein according to the present invention).

TABLE 255
Nucleic acid SNPs

| SNP position on | | |
|---|---|---|
| nucleotide sequence | Alternative nucleic acid | Previously known SNP? |
| 760 | C -> T | No |
| 1461 | A -> T | No |
| 1462 | G -> T | No |
| 1492 | A -> G | No |
| 1670 | T -> C | No |
| 1957 | T -> C | No |
| 2004 | A -> C | No |
| 2005 | A -> T | No |

[2086] Variant protein M78530 PEA_{—}1_P17 (SEQ ID NO:621) according to the present invention has an amino acid sequence it is encoded by transcript(s) M78530_PEA_{—}1_T13 (SEQ ID NO:594). One or more alignments to one or more previously published protein sequences are given in the alignment table located on the attached CDROM. A brief description of the relationship of the variant protein according to the present invention to each such aligned protein is as follows:

[2087] Comparison Report Between M78530_PEA_{—}1_P17 (SEQ ID NO:621) and Q8NCD7 (SEQ ID NO:616):

[2088] 1. An isolated chimeric polypeptide encoding for M78530_PEA_{—}1_P17 (SEQ ID NO:621), comprising a first amino acid sequence being at least 90% homologous to MRLSPAPLKLSRTPALLALALPLAAALAFSDETLDKVPKSEGYCSRILRAQGTRREGYTEFSLRVEG DPDFYKPGTSYRVTLSAAPPSYFRGFTLIALRENREGDKEEDHAGTFQIIDEEETQFMSNCPVAVTE STPRRRTRIQVFWIAPPAGTGCVILKASIVQKRIIYFQDEGSLTKKLCEQDSTFDGVTDKPILDCCAC GTAKYRLTFYGNWSEKTHPKDYPRRANHWSAIIGGSHSKNYVLWEYGGYASEGVKQVAELGSPV KMEEEIRQQ corresponding to amino acids 1-275 of Q8NCD7 (SEQ ID NO:616), which also corresponds to amino acids 1-275 of M78530_PEA_{—}1_P17 (SEQ ID NO:621), and a second amino acid sequence being at least 70%, optionally at least 80%, preferably at least 85%, more preferably at least 90% and most preferably at least 95% homologous to a polypeptide having the sequence VRQKNHRMTK (SEQ ID NO: 670) corresponding to amino acids 276-285 of M78530_PEA_{—}1_P17 (SEQ ID NO:621), wherein said first amino acid sequence and second amino acid sequence are contiguous and in a sequential order.

[2089] 2. An isolated polypeptide encoding for a tail of M78530_PEA_{—}1_P17 (SEQ ID NO:621), comprising a polypeptide being at least 70%, optionally at least about 80%, preferably at least about 85%, more preferably at least about 90% and most preferably at least about 95% homologous to the sequence VRQKNHRMTK (SEQ ID NO: 670) in M78530_PEA_{—}1_P17 (SEQ ID NO:621).

[2090] Comparison Report Between M78530_PEA_{—}1_P17 (SEQ ID NO:621) and Q9HCB6 (SEQ ID NO:617):

[2091] 1. An isolated chimeric polypeptide encoding for M78530_PEA_{—}1_P17 (SEQ ID NO:621), comprising a first amino acid sequence being at least 90% homologous to MRLSPAPLKLSRTPALLALALPLAAALAFSDETLDKVPKSEGYCSRILRAQGTRREGYTEFSLRVEG DPDFYKPGTSYRVTLSAAPPSYFRGFTLIALRENREGDKEEDHAGTFQIIDEEETQFMSNCPVAVTE STPRRRTRIQVFWIAPPAGTGCVILKASIVQKRIIYFQDEGSLTKKLCEQDSTFDGVTDKPILDCCAC GTAKYRLTFYGNWSEKTHPKDYPRRANHWSAIIGGSHSKNYVLWEYGGYASEGVKQVAELGSPV KMEEEIRQQ corresponding to amino acids 1-275 of Q9HCB6 (SEQ ID NO:617), which also corresponds to amino acids 1-275 of M78530_PEA_{—}1_P17 (SEQ ID NO:621), and a second amino acid sequence being at least 70%, optionally at least 80%, preferably at least 85%, more preferably at least 90% and most preferably at least 95% homologous to a polypeptide having the sequence VRQKNHRMTK (SEQ ID NO: 670) corresponding to amino acids 276-285 of M78530 PEA_{—}1_P17 (SEQ ID NO:621), wherein said first amino acid sequence and second amino acid sequence are contiguous and in a sequential order.

[2092] 2. An isolated polypeptide encoding for a tail of M78530_PEA_{—}1_P17 (SEQ ID NO:621), comprising a polypeptide being at least 70%, optionally at least about 80%, preferably at least about 85%, more preferably at least about 90% and most preferably at least about 95% homologous to the sequence VRQKNHRMTK (SEQ ID NO: 670) in M78530_PEA_{—}1_P17 (SEQ ID NO:621).

[2093] Comparison Report Between M78530_PEA_{—}1_P17 (SEQ ID NO:621) and O94862 (SEQ ID NO:618):

[2094] 1. An isolated chimeric polypeptide encoding for M78530_PEA_{—}1_P17 (SEQ ID NO:621), comprising a first amino acid sequence being at least 70%, optionally at least 80%, preferably at least 85%, more preferably at least 90% and most preferably at least 95% homologous to a polypeptide having the sequence MRLSPAPLKLSRTPALLALALPLAAALAFSDETLDKVPKSEGYCSRILRAQGTRREGYTEFSLRVEG DPDFYKPGTSYRVTLS (SEQ ID NO: 668) corresponding to amino acids 1-83 of M78530_PEA_{—}1_P17 (SEQ ID NO:621), a second amino acid sequence being at least 90% homologous to AAPPSYFRGFTLIALRENREGDKEEDHAGTFQIIDEEETQFMSNCPVAVTESTPRRRTRIQVFWIAPP AGTGCVILKASIVQKRIIYFQDEGSLTKKLCEQDSTFDGVTDKPILDCCACGTAKYRLTFYGNWSE KTHPKDYPRRANHWSAIIGGSHSKNYVLWEYGGYASEGVKQVAELGSPVKMEEEIRQQ corresponding to amino acids 1-192 of O94862 (SEQ ID NO:618), which also corresponds to amino acids 84-275 of M78530_PEA_{—}1_P17 (SEQ ID NO:621), and a third amino acid sequence being at least 70%, optionally at least 80%, preferably at least 85%, more preferably at least 90% and most preferably at least 95% homologous to a polypeptide having the sequence VRQKNHRMTK (SEQ ID NO: 670) corresponding to amino acids 276-285 of M78530_PEA_{—}1_P17 (SEQ ID NO:621), wherein said first amino acid sequence, second amino acid sequence and third amino acid sequence are contiguous and in a sequential order.

[2095] 2. An isolated polypeptide encoding for a head of M78530_PEA_{—}1_P17 (SEQ ID NO:621), comprising a polypeptide being at least 70%, optionally at least about 80%, preferably at least about 85%, more preferably at least about 90% and most preferably at least about 95% homologous to the sequence MRLSPAPLKLSRTPALLALALPLAAALAFSDETLDKVPKSEGYCSRILRAQGTRREGYTEFSLRVEG DPDFYKPGTSYRVTLS (SEQ ID NO: 668) of M78530_PEA_{—}1_P17 (SEQ ID NO:621).

[2096] 3. An isolated polypeptide encoding for a tail of M78530_PEA_{—}1_P17 (SEQ ID NO:621), comprising a polypeptide being at least 70%, optionally at least about 80%, preferably at least about 85%, more preferably at least about 90% and most preferably at least about 95% homologous to the sequence VRQKNHRMTK (SEQ ID NO: 670) in M78530_PEA_{—}1_P17 (SEQ ID NO:621).

[2097] The location of the variant protein was determined according to results from a number of different software programs and analyses, including analyses from SignalP and other specialized programs. The variant protein is believed to be located as follows with regard to the cell: secreted. The protein localization is believed to be secreted because both signal-peptide prediction programs predict that this protein has a signal peptide, and neither trans-membrane region prediction program predicts that this protein has a trans-membrane region.

[2098] Variant protein M78530_PEA_{—}1_P17 (SEQ ID NO:621) is encoded by the following transcript(s): M78530_PEA_{—}1_T13 (SEQ ID NO:594). The coding portion of transcript M78530_PEA_{—}1_T13 (SEQ ID NO:594) starts at position 629 and ends at position 1483. The transcript also has the following SNPs as listed in Table 256 (given according to their position on the nucleotide sequence, with the alternative nucleic acid listed; the last column indicates whether the SNP is known or not; the presence of known SNPs in variant protein M78530_PEA_{—}1_P17 (SEQ ID NO:621) sequence provides support for the deduced sequence of this variant protein according to the present invention).

TABLE 256
Nucleic acid SNPs

| SNP position on nucleotide | Alternative | |
|---|---|---|
| sequence | nucleic acid | Previously known SNP? |
| 760 | C -> T | No |

[2099] Table 257 below describes the starting and ending position of M78530_PEA_{—}1_node_{—}37 (SEQ ID NO:604) on the relevant transcript. Experimental results for this segment are described below.

TABLE 257
Segment location on transcripts

| | Segment | |
|---|---|---|
| | starting | Segment |
| Transcript name | position | ending position |
| M78530_PEA_1_T11 (SEQ ID NO: 592) | 2625 | 2816 |

Expression of Spondin 1 M78530 transcripts which are detectable by amplicon as depicted in sequence name M78530seg37 (SEQ ID NO: 624) in normal and cancerous ovary tissues

[2100] Expression of Spondin 1 transcripts detectable by or according to seg37-M78530 seg37 (SEQ ID NO: 624) amplicon and primers M78530seg37F (SEQ ID NO: 622) and M78530seg37R (SEQ ID NO: 623) was measured by real time PCR. In parallel the expression of four housekeeping genes—PBGD (GenBank Accession No. BC019323 (SEQ ID NO:6); amplicon—PBGD-amplicon (SEQ ID NO:32)), HPRT1 (GenBank Accession No. NM_{—}000194 (SEQ ID NO:5); amplicon—HPRT1-amplicon (SEQ ID NO:35)), SDHA (GenBank Accession No. NM_{—}004168 (SEQ ID NO:4); amplicon—SDHA-amplicon (SEQ ID NO:29)), and GAPDH (GenBank Accession No. BC026907 (SEQ ID NO:3); GAPDH amplicon (SEQ ID NO: 41)) was measured similarly. For each RT sample, the expression of the above amplicon was normalized to the geometric mean of the quantities of the housekeeping genes. The normalized quantity of each RT sample was then divided by the median of the quantities of the normal post-mortem (PM) samples (Sample Nos. 45, 46, 48, 71, Table 3, above, “Tissue samples in ovarian cancer testing panel”), to obtain a value of fold up-regulation for each sample relative to median of the normal PM samples.

[2101] FIG. 91 is a histogram showing over expression of the above-indicated Spondin 1 transcripts in cancerous ovary samples relative to the normal samples.

[2102] As is evident from FIG. 91, the expression of Spondin 1 transcripts detectable by the above amplicon was higher in a few cancer samples than in the non-cancerous samples (Sample Nos. 45, 46, 48, 71, Table 2, “Tissue samples in ovarian cancer testing panel”. Notably an over-expression of at least 5 fold was found in 3 out of 40 adenocarcinoma samples.

[2103] Primer pairs are also optionally and preferably encompassed within the present invention; for example, for the above experiment, the following primer pair was used as a non-limiting illustrative example only of a suitable primer pair: M78530seg37F (SEQ ID NO: 622) forward primer; and M78530seg37R (SEQ ID NO: 623) reverse primer.

[2104] The present invention also preferably encompasses any amplicon obtained through the use of any suitable primer pair; for example, for the above experiment, the following amplicon was obtained as a non-limiting illustrative example only of a suitable amplicon: M78530seg37 (SEQ ID NO: 624).

[2105] Primers:

| | |
|---|---|
| Forward primer M78530seg37F: | (SEQ ID NO: 622) |
| AGCTCCTCAAGGCCCATCA | |
| Reverse primer M78530seg37R: | (SEQ ID NO: 623) |
| AACTCTTCCCCAGCAAACCAT | |
| Amplicon M78530seg37: | (SEQ ID NO: 624) |

AGCTCCTCAAGGCCCATCACTTCTATGTTCCTGAGTCCAGGGAGCCCCGAACCAGCCAGTGCT
AATACTGCTAGATCCTAGAATAACATGGTTTGCTGGGGAAGAGTT

Expression of Spondin 1 M78530 transcripts which are detectable by amplicon as depicted in sequence name M78530seg40WT (SEQ ID NO: 627) in normal and cancerous ovary tissues

[2106] Expression of Spondin 1 transcripts detectable by or according to seg40WT-M78530 Seg40WT (SEQ ID NO: 627) amplicon and primers M78530seg40WTF (SEQ ID NO: 625) and M78530seg40WTR (SEQ ID NO: 626) was measured by real time PCR. In parallel the expression of four housekeeping genes—PBGD (GenBank Accession No. BC019323 (SEQ ID NO:6); amplicon—PBGD-amplicon (SEQ ID NO:32)), HPRT1 (GenBank Accession No. NM_{—}000194 (SEQ ID NO:5); amplicon—HPRT1-amplicon (SEQ ID NO:35)), SDHA (GenBank Accession No. NM_{—}004168 (SEQ ID NO:4); amplicon—SDHA-amplicon (SEQ ID NO:29)), and GAPDH (GenBank Accession No. BC026907 (SEQ ID NO:3); GAPDH amplicon (SEQ ID NO: 41)) was measured similarly. For each RT sample, the expression of the above amplicon was normalized to the geometric mean of the quantities of the housekeeping genes. The normalized quantity of each RT sample was then divided by the median of the quantities of the normal post-mortem (PM) samples (Sample Nos. 45, 46, 48, 71, Table 3, above, “Tissue samples in ovarian cancer testing panel”), to obtain a value of fold up-regulation for each sample relative to median of the normal PM samples.

[2107] FIG. 92 is a histogram showing over expression of the above-indicated Spondin 1 transcripts in cancerous ovary samples relative to the normal samples.

[2108] As is evident from FIG. 92, the expression of Spondin 1 transcripts detectable by the above amplicon was higher in a few cancer samples than in the non-cancerous samples (Sample Nos. 45, 46, 48, 71, Table 2, “Tissue samples in ovarian cancer testing panel”). Notably an over-expression of at least 5 fold was found in 7 out of 40 adenocarcinoma samples.

[2109] Primer pairs are also optionally and preferably encompassed within the present invention; for example, for the above experiment, the following primer pair was used as a non-limiting illustrative example only of a suitable primer pair: M78530seg40WTF (SEQ ID NO: 625) forward primer; and M78530seg40WTR (SEQ ID NO: 626) reverse primer.

[2110] The present invention also preferably encompasses any amplicon obtained through the use of any suitable primer pair; for example, for the above experiment, the following amplicon was obtained as a non-limiting illustrative example only of a suitable amplicon: M78530seg40WT (SEQ ID NO: 627). FIG. 91 is a histogram showing expression of Spondin 1 M78530 transcripts which are detectable by amplicon as depicted in sequence name M78530 seg40WT (SEQ ID NO: 627) in normal and cancerous ovary tissues

[2111] Primers:

| | |
|---|---|
| Forward primer M78530seg40WTF: | (SEQ ID NO: 625) |
| TCCCAGTGGTCGGAATGTAAC | |
| Reverse primer M78530seg40WT: | (SEQ ID NO: 626) |
| GCACTTTTTTCGCTGCACAG | |
| Amplicon M78530seg40WT: | (SEQ ID NO: 627) |

TCCCAGTGGTCGGAATGTAACAAGTCATGTGGGAAAGGCCACGTGATTCGAACCCGGATGAT
CCAAATGGAGCCTCAGTTTGGAGGTGCACCCTGCCCAGAGACTGTGCAGCGAAAAAAGTGC

Expression of spondin 1 transcripts which are detectable by junction of segments 2-4, in normal, benign and cancerous ovary tissues

[2112] Expression of spondin 1 transcripts detectable by or according to junction of segments 2-4, was measured with oligonucleotide-based micro-arrays. The results of image intensities for each feature were normalized according to the percentile 95 of the image intensities of all the features on the chip. Then, feature image intensities for replicates of the same oligonucleotide on the chip and replicates of the same sample were averaged. Outlying results were discarded.

[2113] For oligonucleotide M78530_{—}0_{—}27_{—}120 (SEQ ID NO:14) the averaged intensity determined for every sample was divided by the median intensity of all the normal samples (Samples November 2-13, Table 258, below), to obtain a value of fold up-regulation for each sample relative to the median normal samples. These data are presented in a histogram bellow. As is evident from the histogram, the expression of spondin 1 transcripts detectable with the above oligonucleotides in cancer samples was significantly higher than in the normal samples. FIG. 93 is a histogram showing Expression of spondin 1 transcripts which are detectable by junction of segments 2-4, in normal, benign and cancerous ovary tissues.

| | |
|---|---|
| >M78530_0_27_120 | (SEQ ID NO: 14) |

CCAGATCATAGACGAAGAAGAAACTCAGTTTATGAGCAATTGCCCTGTTG

TABLE 258

| | TAA2_MA | | | | | | |
|---|---|---|---|---|---|---|---|
| Sample # | ID | Tissue ID | RNA ID | Source | age | Stage | grade |
| | | OvSr = SEROUS | | | | | |
| | | ADENOCARCINOMA | | | | | |
| 1 | OvSr1 | 2O37OAI3 | 2O37ORTX | GCI | 43 | II | |
| 2 | OvSr2 | 3NTISA77 | 3NTISRY4 | GCI | 53 | III | |
| 3 | OvSr3 | 4WAABA68 | 4WAABR62 | GCI | 63 | III | 1 |
| 4 | OvSr4 | 79Z67AL4 | 79Z67RFA | GCI | 67 | III | |
| 5 | OvSr5 | 7B3DPA5S | 7B3DPR3Y | GCI | 70 | II | 2 |
| 6 | OvSr6 | 7RMHZAMG | 7RMHZRQ9 | GCI | 63 | III | 3 |
| 7 | OvSr7 | CEJUSAVO | CEJUSRZG | GCI | 53 | III | 3 |
| 8 | OvSr8 | DDSNLAWD | DDSNLR79 | GCI | 68 | III | 3 |
| 9 | OvSr9 | DH8PHAMR | DH8PHRPE | GCI | 70 | IV | 3 |
| 10 | OvSr10 | 5NCLKA15 | 5NCLKR2O | GCI | 54 | III | |
| 11 | OvSr11 | 1HI5HAHH | 1HI5HRE2 | GCI | 61 | III | |
| 12 | OvSr12 | 33-B-Pap Sero CystAde G1 | A503175 | BioChain | 41 | | 1 |
| 13 | OvSr13 | 31-B-Pap Sero CystAde G3 | A503176 | BioChain | 52 | | 3 |
| 14 | OvSr14 | 29-G-Sero Adeno G3 | 2001-12-G035 | GOG | 50 | | 3 |
| 15 | OvSr15 | 9-G-Adeno G3 | 99-06-G901 | GOG | 84 | | 3 |
| 66 | OvSr16 | 18701 | 40773C1 | Asterand | 59 | IIA | 2 |
| 67 | OvSr17 | 13268 | 19832A1 | Asterand | 48 | IIIC | high |
| | | | | | | | grade |
| | | OvPp = Papillary | | | | | |
| | | adenocarcinoma | | | | | |
| 16 | OvPp1 | 4-A-Pap CystAdeno G2 | ILS-7286 | ABS | 50 | | 2 |
| 17 | OvPp2 | 3-A-Pap Adeno G2 | ILS-1431 | ABS | 52 | | 2 |
| 18 | OvPp3 | 2-A-Pap Adeno G2 | ILS-1408 | ABS | 53 | | 2 |
| 19 | OvPp4 | 25-A-Pap Sero Adeno G3 | N0021 | ABS | 55 | | 3 |
| 20 | OvPp5 | 1-A-Pap Adeno G3 | ILS-1406 | ABS | 73 | | 3 |
| 21 | OvPp6 | 66-G-Pap Sero Adeno G3 SIV | 2000-01-G413 | GOG | 67 | | 3 |
| | | OvEm = ENDOMETROID | | | | | |
| | | ADENOCARINOMA | | | | | |
| 22 | OvEm1 | 1U52XAHJ | 1U52XRPE | GCI | 61 | II | 3 |
| 23 | OvEm2 | 533DXAHE | 533DXRKV | GCI | 50 | I | |
| 24 | OvEm3 | 5895CAXD | 5895CR56 | GCI | 39 | I | |
| 25 | OvEm4 | A17WSACA | A17WSR7Y | GCI | 67 | II | 2 |
| 26 | OvEm5 | E2WKFA4F | E2WKFRPT | GCI | 30 | I | 1 |
| 27 | OvEm6 | HZ2EYAU6 | HZ2EYRC6 | GCI | 55 | I | 3 |
| 28 | OvEm7 | PZQXHALS | PZQXHRGN | GCI | 52 | III | 1 |
| 29 | OvEm8 | RWOIVALL | RWOIVRI1 | GCI | 47 | II | |
| 30 | OvEm9 | 1VT3IAZ6 | 1VT3IRT1 | GCI | 50 | III | 3 |
| 31 | OvEm10 | I8VHZALI | I8VHZRR4 | GCI | 68 | IV | 3 |
| 32 | OvEm11 | 34-G-Pap Endo Adeno G3 | 95-04-2002 | GOG | 68 | | 3 |
| | | OvMu = Mucinous | | | | | |
| | | adenocarcinoma and mucinus | | | | | |
| | | borderline | | | | | |
| | | Mucinus adenocarcinoma | | | | | |
| 33 | OvMu1 | 22-A-Muc CystAde G2 | A0139 | ABS | 72 | | 2 |
| 35 | OvMu6 | 19-B-Muc Adeno G3 | A504085 | BioChain | 34 | | 3 |
| 36 | OvMu3 | 17-B-Muc Adeno G3 | A504084 | BioChain | 51 | | 3 |
| 37 | OvMu5 | IMDA1ANG | IMDA1RQG | GCI | 41 | I | 3 |
| 38 | OvMu2 | 21-G-Muc CystAde G2-3 | 95-10-G020 | GOG | 44 | | 2 to 3 |
| 68 | OvMu7 | 12742 | 18920A1 | Asterand | 61 | IC | |
| 69 | OvMu8 | NJM4UAC4 | NJM4URI5 | GCI | 51 | | |
| | | Mucinus borderline tumors | | | | | |
| 70 | OvMu9_BL | 3D5FOA9R | 3D5FORJ9 | GCI | 51 | 1A | |
| 71 | OvMu10_BL | 7JP3FAIH | 7JP3FRCY | GCI | 56 | 1A | 1 |
| 72 | OvMu11_BL | SC656AKT | SC656RN6 | GCI | 40 | 1A | |
| 34 | OvMu4 | 23-A-Muc CystAde G3 | VNM-00187 | ABS | 45 | | |
| | | OvBe = Benign samples | | | | | |
| 39 | OvBe1 | 62-G-Ben Muc CysAdenoma | 99-10-G442 | GOG | 32 | | |
| 40 | OvBe2 | 60-G-Muc CysAdenoma | 99-01-G043 | GOG | 40 | | |
| 41 | OvBe3 | 56-G-Ben Muc CysAdeno | 99-01-G407 | GOG | 46 | | |
| 42 | OvBe4 | 64-G-Ben Sero CysAdenoma | 99-06-G039 | GOG | 57 | | |
| 43 | OvBe5 | 59-G-Sero CysAdenoFibroma | 98-12-G401 | GOG | 77 | | |
| 44 | OvBe6 | QLIKYAKS | QLIKYRNG | GCI | 42 | | |
| 45 | OvBe7 | 943ECATN | 943ECRVO | GCI | 54 | | |
| 46 | OvBe8 | 943ECAW7 | 943ECRYK | GCI | 54 | | |
| 47 | OvBe9 | JO8W7AKQ | JO8W7RTI | GCI | 56 | | |
| 48 | OvBe10 | DQQ2FAMC | DQQ2FRAC | GCI | 68 | | |
| | | NOv = Normal Samples | | | | | |
| 49 | NOv1 | 45-B-N | A503274 | BioChain | 41 | | |
| 50 | NOv2 | 46-B-N | A504086 | BioChain | 41 | | |
| 51 | NOv3 | 48-B-N | A504087 | BioChain | 51 | | |
| 52 | NOv4 | GWXUZN5M | GWXUZRI3 | GCI | 53 | | |
| 53 | NOv5 | IDUVYN9I | IDUVYROT | GCI | 47 | | |
| 54 | NOv6 | L629FN58 | L629FRV1 | GCI | 47 | | |
| 55 | NOv7 | SJ2R2NPS | SJ2R2RFN | GCI | 43 | | |
| 56 | NOv8 | TW9PMN69 | TW9PMR25 | GCI | 46 | | |
| 57 | NOv9 | XLB23NA4 | XLB23RKV | GCI | 47 | | |
| 58 | NOv10 | DWHTZNBF | DWHTZRQX | GCI | 42 | | |
| 59 | NOv11 | FDPL9NJ6 | FDPL9RVC | GCI | 56 | | |
| 60 | NOv12 | TOAE5N2M | TOAE5R37 | GCI | 45 | | |
| 61 | NOv13 | DD73BNIO | DD73BR3V | GCI | 49 | | |
| | | OvExtr = Clear cell & other | | | | | |
| | | samples | | | | | |
| 62 | OvExtr1 | 41-G-Mix Sero/Muc/Endo G2 | 98-03-G803 | GOG | 38 | | 2 |
| 63 | OvExtr2 | 43-G-Clear cell Adeno G3 | 2001-10-G002 | GOG | 74 | | 3 |
| 64 | OvExtr3 | 44-G-Clear cell Adeno | 2001-07-G084 | GOG | 73 | | |
| 65 | OvExtr4 | 42-G-Adeno borderline | 98-08-G001 | GOG | 46 | | |

[2114] It is appreciated that certain features of the invention, which are, for clarity, described in the context of separate embodiments, may also be provided in combination in a single embodiment. Conversely, various features of the invention, which are, for brevity, described in the context of a single embodiment, may also be provided separately or in any suitable subcombination.

[2115] Although the invention has been described in conjunction with specific embodiments thereof, it is evident that many alternatives, modifications and variations will be apparent to those skilled in the art. Accordingly, it is intended to embrace all such alternatives, modifications and variations that fall within the spirit and broad scope of the appended claims. All publications, patents and patent applications mentioned in this specification are herein incorporated in their entirety by reference into the specification, to the same extent as if each individual publication, patent or patent application was specifically and individually indicated to be incorporated herein by reference. In addition, citation or identification of any reference in this application shall not be construed as an admission that such reference is available as prior art to the present invention.

1-94. (canceled)

95. An isolated polynucleotide comprising the polynucleotide sequence set forth in a member selected from the group consisting of SEQ ID NOs: 10, 11, 13, 26, 93, 96, 99, 120, 123, 126, 144, 147, 150-163, 247, 250-315, 325, 328, 331, 334, 337-362, 370, 375, 378, 381, 384, 387-399, 407, 410-425, 432-462, 471, 474, 477, 550, 552, 557, 560, 563, 585, 588, 591, 624, 627, 630 and 698, or a sequence at least about 95% identical thereto.

96. An isolated polypeptide comprising the polypeptide sequence set forth in a member selected from the group consisting of SEQ ID NOs: 165, 166, 317-322, 364-369, 401-404, 427-429, 464-468, 642, 643, 650-664, or a sequence at least about 95% identical thereto.

97. An expression vector comprising the polynucleotide sequence according to claim 95.

98. A host cell comprising the vector of claim 97.

99. A process for producing a polypeptide comprising: culturing the host cell according to claim 98 under conditions suitable to produce the polypeptide encoded by said polynucleotide; and recovering said polypeptide.

100. An isolated primer pair, comprising the pair of nucleic acid sequences selected from the group consisting of: SEQ NOs. 91-92, 94-95, 97-98, 118-119, 121-122, 124-125, 142-143, 145-146, 148-149, 245-246, 248-249, 323-324, 326-327, 329-330, 332-333, 335-336, 371-374, 376-377, 379-380, 382-383, 385-386, 405-406, 408-409, 430-431, 469-470, 472-473, 475-476, 548-549, 551, 553-556, 558-559, 561-562, 583-584, 586-587, 589-590, 622-623, 625-626, and 699-701.

101. An antibody to specifically bind to the polypeptide of claim 96.

102. A kit for detecting a marker-detectable disease, comprising at least one primer pair of claim 100.

103. The kit of claim 102, wherein the marker-detectable disease is cancer, and is selected from the group consisting of ovarian cancer, breast cancer, colon cancer, lung cancer and prostate cancer, and wherein the cancer is invasive or metastatic.

104. The kit of claim 102, wherein the marker-detectable disease is heart disorder, cardiac disease or cardiac pathology, and is selected from the group consisting of: Myocardial infarction; ungina pectoris (stable and unstable); cardiomyopathy; myocarditis; heart failure; congestive heart failure; the detection of reinfarction; the detection of success of thrombolytic therapy after Myocardial infarct; Myocardial infarct after surgery, or assessing the size of infarct in Myocardial infarct; acute coronary syndrome; the differential diagnosis of heart related conditions from lung related conditions (as pulmonary embolism); the differential diagnosis of Dyspnea; cardiac valves related conditions; sudden cardiac death from arrhythmia or any other heart related reason; rejection of a transplanted heart; atrial and ventricular septal defects; conditions that cause atrial and or ventricular wall volume overload, systemic arterial hypertension.

105. The kit of claim 102, wherein the marker-detectable disease is cerebrovascular disease, and is selected from the group consisting of: stroke; ischemic stroke; thrombotic stroke; embolic stroke; lacunar stroke; hypoperfusion stroke; hemorrhagic stroke; transient ischemic attacks; neural tissue injury; brain trauma; and any type of cerebrovascular accident.

106. The kit of claim 102, wherein the marker-detectable disease is acute and chronic inflammation, and is selected from the group consisting of hypercholesterolemia, diabetes, atherosclerosis, acute or chronic inflammation that involves blood vessels, including coronary arteries and blood vessels of the brain, cerebral stroke, peripheral vascular disease, vasculitis, polyarteritis nodosa, ANCA associated small vessel vasculitis, Churg-Strauss syndrome, Henoch-Schonlein purpura, scleroderma, thromboangiitis obliterans, temporal arteritis, Takayasu's arteritis, hypersensitivity vasculitis, Kawasaki disease, Behçet syndrome, and their complications including coronary disease, angina pectoris, deep vein thrombosis, renal disease, diabetic nephropathy, lupus nephritis, renal artery thrombosis, renal artery stenosis, atheroembolic disease of the renal arteries, renal vein thrombosis, hemolytic uremic syndrome, thrombotic thrombocytopenic purpura, arteriolar nephrosclerosis, preeclampsia, eclampsia, albuminuria, microalbuminuria, glomerulonephritis, renal failure, hypertension, uremia, cerebrovascular disease, peripheral vascular disease, intermittent claudication, abdominal angina; rheumatic/autoimmune diseases that involve systemic immune reaction including rheumatoid arthritis, scleroderma, mixed connective tissue disease, Sjogren syndrome, ankylosing spondylitis, spondyloarthropathy, psoriasis, psoriatic arthritis, myositis and systemic lupus erythematosus; acute or chronic infective processes that involve systemic immune reaction, including pneumonia, bacteremia, sepsis, pyelonephritis, cellulitis, osteomyelitis, meningitis and viral hepatitis; malignant and idiopathic processes that involve systemic immune reaction or proliferation of immune cells, including granulomatous disorders, Wegener's granulomatosis, lymphomatoid granulomatosis/polymorphic reticulosis, idiopathic midline granuloma, multiple myeloma, Waldenstrom's macroglobulinemia, Castleman's disease, histiocytosis.

107. A kit for detecting a marker-detectable disease, comprising the antibody of claim 101.

108. The kit of claim 107, wherein said kit further comprises at least one immunoassay reagent.

109. The kit of claim 108, wherein said immunoassay is selected from the group consisting of an enzyme linked immunosorbent assay (ELISA), an immunoprecipitation assay, an immunofluorescence analysis, an enzyme immunoassay (EIA), a radioimmunoassay (RIA), or a Western blot analysis.

110. The kit of claim 107, wherein the marker-detectable disease is cancer, and is selected from the group consisting of ovarian cancer, breast cancer, colon cancer, lung cancer and prostate cancer, and wherein the cancer is invasive or metastatic.

111. The kit of claim 107, wherein the marker-detectable disease is heart disorder, cardiac disease or cardiac pathology, and is selected from the group consisting of: Myocardial infarction; ungina pectoris (stable and unstable); cardiomyopathy; myocarditis; heart failure; congestive heart failure; the detection of reinfarction; the detection of success of thrombolytic therapy after Myocardial infarct; Myocardial infarct after surgery, or assessing the size of infarct in Myocardial infarct; acute coronary syndrome; the differential diagnosis of heart related conditions from lung related conditions (as pulmonary embolism); the differential diagnosis of Dyspnea; cardiac valves related conditions; sudden cardiac death from arrhythmia or any other heart related reason; rejection of a transplanted heart; atrial and ventricular septal defects; conditions that cause atrial and or ventricular wall volume overload, systemic arterial hypertension.

112. The kit of claim 107, wherein the marker-detectable disease is cerebrovascular disease, and is selected from the group consisting of: stroke; ischemic stroke; thrombotic stroke; embolic stroke; lacunar stroke; hypoperfusion stroke; hemorrhagic stroke; transient ischemic attacks; neural tissue injury; brain trauma; and any type of cerebrovascular accident.

113. The kit of claim 107, wherein the marker-detectable disease is acute and chronic inflammation, and is selected from the group consisting of hypercholesterolemia, diabetes, atherosclerosis, acute or chronic inflammation that involves blood vessels, including coronary arteries and blood vessels of the brain, cerebral stroke, peripheral vascular disease, vasculitis, polyarteritis nodosa, ANCA associated small vessel vasculitis, Churg-Strauss syndrome, Henoch-Schonlein purpura, scleroderma, thromboangiitis obliterans, temporal arteritis, Takayasu's arteritis, hypersensitivity vasculitis, Kawasaki disease, Behçet syndrome, and their complications including coronary disease, angina pectoris, deep vein thrombosis, renal disease, diabetic nephropathy, lupus nephritis, renal artery thrombosis, renal artery stenosis, atheroembolic disease of the renal arteries, renal vein thrombosis, hemolytic uremic syndrome, thrombotic thrombocytopenic purpura, arteriolar nephrosclerosis, preeclampsia, eclampsia, albuminuria, microalbuminuria, glomerulonephritis, renal failure, hypertension, uremia, cerebrovascular disease, peripheral vascular disease, intermittent claudication, abdominal angina; rheumatic/autoimmune diseases that involve systemic immune reaction including rheumatoid arthritis, scleroderma, mixed connective tissue disease, Sjogren syndrome, ankylosing spondylitis, spondyloarthropathy, psoriasis, psoriatic arthritis, myositis and systemic lupus erythematosus; acute or chronic infective processes that involve systemic immune reaction, including pneumonia, bacteremia, sepsis, pyelonephritis, cellulitis, osteomyelitis, meningitis and viral hepatitis; malignant and idiopathic processes that involve systemic immune reaction or proliferation of immune cells, including granulomatous disorders, Wegener's granulomatosis, lymphomatoid granulomatosis/polymorphic reticulosis, idiopathic midline granuloma, multiple myeloma, Waldenstrom's macroglobulinemia, Castleman's disease, histiocytosis.

114. A method for detecting a marker-detectable disease, comprising detecting overexpression of the polynucleotide sequence set forth in a member selected from the group consisting of SEQ ID NOs: 10, 11, 13, 26, 93, 96, 99, 120, 123, 126, 144, 147, 150-163, 247, 250-315, 325, 328, 331, 334, 337-362, 370, 375, 378, 381, 384, 387-399, 407, 410-425, 432-462, 471, 474, 477, 550, 552, 557, 560, 563, 585, 588, 591, 624, 627, 630 and 698, or a sequence at least about 95% identical thereto in a sample from a patient.

115. The method of claim 114, wherein said detecting overexpression comprises performing nucleic acid amplification.

116. The method of claim 114, wherein the marker-detectable disease is cancer, and is selected from the group consisting of ovarian cancer, breast cancer, colon cancer, lung cancer and prostate cancer, and wherein the cancer is invasive or metastatic.

117. The method of claim 116, wherein the disease is ovarian cancer and the method further comprises determining one or more of the following: detecting a condition selected from the group consisting of invasive ovarian cancer, metastatic ovarian cancer, a non-ovarian cancer condition elevating serum levels of one or more ovary related markers; identifying a metastasis of unknown origin originating from a primary ovarian cancer, distinguishing between different types of ovarian cancer, differentially diagnosing benign or malignant ovarian cysts; correlating ovarian cancer stage or malignant potential; differentially diagnosing ovarian cancer or a non-ovarian cancer selected from the group consisting of benign (functional) ovarian cyst, uterine fibroids, endometriosis, benign ovarian neoplasms or inflammatory bowel lesions; or determining whether ovarian cancer causes a condition suggestive of a malignant tumor selected from the group consisting of anorexia, cachexia, weight loss, fever, hypercalcemia, skeletal or abdominal pain, paraneoplastic syndrome; or ascites.

118. The method of claim 117, wherein said metastasis of unknown origin comprises one or more of gastric carcinoma, breast cancer, colorectal carcinoma or pancreatic carcinoma.

119. The method of claim 117, wherein said non-ovarian cancer condition elevating serum levels of one or more ovary related markers comprises one or more of cancers of the endometrium, cervix, fallopian tubes, pancreas, breast, lung and colon; pregnancy, endometriosis, pelvic inflammatory disease or uterine fibroids.

120. The method of claim 116, wherein the disease is colon cancer and the method further comprises determining one or more of the following: detecting a condition selected from the group consisting of invasive colon cancer, metastatic colon cancer or colon adenocarcinoma.

121. The method of claim 116, wherein the disease is prostate cancer and the method further comprises determining one or more of the following: detecting a condition selected from the group consisting of invasive prostate cancer or metastatic prostate cancer.

122. The method of claim 116, wherein the disease is breast cancer and the method further comprises determining one or more of the following: determining a likely outcome; detecting breast cancer in patients with age above 55 and/or patients with an age below 45; identifying a metastasis of unknown origin which originated from a primary breast cancer tumor; assessing lymphadenopathy; distinguishing between different types of breast cancer; differentially diagnosing between a benign and malignant breast mass; assessing conditions affecting breast skin for differentiation from breast cancer; differentially diagnosing between breast pain or discomfort resulting from either breast cancer or other conditions; differentially diagnosing between breast cancer and one or more of an abnormal mammogram and/or nipple retraction and/or nipple discharge due to causes other than breast cancer; determining whether breast cancer is causing a condition suggestive of a malignant tumor selected from the group consisting of anorexia, cachexia, weight loss, fever, hypercalcemia, paraneoplastic syndrome; differentially diagnosing between breast cancer and one or more of other malignancies, infections and autoimmune diseases.

123. The method of claim 116, wherein the disease is lung cancer and the method further comprises determining one or more of the following: detecting a condition selected from the group consisting of invasive lung cancer, metastatic lung cancer, squamous cell lung carcinoma, lung adenocarcinoma, carcinoid, small cell lung cancer, non-small cell lung cancer; identifying a metastasis of unknown origin which originated from a primary lung cancer; assessing a malignant tissue residing in the lung that is from a non-lung origin; distinguishing between different types of lung cancer; determining a cause of unexplained dyspnea and/or chronic cough and/or hemoptysis; differentially diagnosing origin of a pleural effusion; differentially diagnosing between lung cancer and a non-lung cancer condition selected from the group consisting of non-malignant causes of lung symptoms and signs; lung lesions and infiltrates, wheeze, stridor, tracheal obstruction, esophageal compression, dysphagia, recurrent laryngeal nerve paralysis, hoarseness, phrenic nerve paralysis with elevation of the hemidiaphragm and Horner syndrome; or determining a cause of a condition suggestive of a malignant tumor selected from the group consisting of anorexia, cachexia, weight loss, fever, hypercalcemia, hypophosphatemia, hyponatremia, syndrome of inappropriate secretion of antidiuretic hormone, elevated ANP, elevated ACTH, hypokalemia, clubbing, neurologic-myopathic syndromes and thrombophlebitis.

124. The method of claim 123, wherein said non-lung origin of said malignant tissue in the lung is selected from the group consisting of osteogenic and soft tissue sarcomas; colorectal, uterine, cervix and corpus tumors; head and neck, breast, testis and salivary gland cancers; melanoma; and bladder and kidney tumors.

125. The method of claim 114, wherein the marker-detectable disease is heart disorder, cardiac disease or cardiac pathology, and is selected from the group consisting of: Myocardial infarction; ungina pectoris (stable and unstable); cardiomyopathy; myocarditis; heart failure; congestive heart failure; the detection of reinfarction; the detection of success of thrombolytic therapy after Myocardial infarct; Myocardial infarct after surgery, or assessing the size of infarct in Myocardial infarct; acute coronary syndrome; the differential diagnosis of heart related conditions from lung related conditions (as pulmonary embolism); the differential diagnosis of Dyspnea; cardiac valves related conditions; sudden cardiac death from arrhythmia or any other heart related reason; rejection of a transplanted heart; atrial and ventricular septal defects; conditions that cause atrial and or ventricular wall volume overload, systemic arterial hypertension.

126. The method of claim 114, wherein the marker-detectable disease is cerebrovascular disease, and is selected from the group consisting of: stroke; ischemic stroke; thrombotic stroke; embolic stroke; lacunar stroke; hypoperfusion stroke; hemorrhagic stroke; transient ischemic attacks; neural tissue injury; brain trauma; and any type of cerebrovascular accident.

127. The method of claim 114, wherein the marker-detectable disease is acute and chronic inflammation is selected from the group consisting of hypercholesterolemia, diabetes, atherosclerosis, acute or chronic inflammation that involves blood vessels, including coronary arteries and blood vessels of the brain, cerebral stroke, peripheral vascular disease, vasculitis, polyarteritis nodosa, ANCA associated small vessel vasculitis, Churg-Strauss syndrome, Henoch-Schonlein purpura, scleroderma, thromboangiitis obliterans, temporal arteritis, Takayasu's arteritis, hypersensitivity vasculitis, Kawasaki disease, Behçet syndrome, and their complications including coronary disease, angina pectoris, deep vein thrombosis, renal disease, diabetic nephropathy, lupus nephritis, renal artery thrombosis, renal artery stenosis, atheroembolic disease of the renal arteries, renal vein thrombosis, hemolytic uremic syndrome, thrombotic thrombocytopenic purpura, arteriolar nephrosclerosis, preeclampsia, eclampsia, albuminuria, microalbuminuria, glomerulonephritis, renal failure, hypertension, uremia, cerebrovascular disease, peripheral vascular disease, intermittent claudication, abdominal angina; rheumatic/autoimmune diseases that involve systemic immune reaction including rheumatoid arthritis, scleroderma, mixed connective tissue disease, Sjogren syndrome, ankylosing spondylitis, spondyloarthropathy, psoriasis, psoriatic arthritis, myositis and systemic lupus erythematosus; acute or chronic infective processes that involve systemic immune reaction, including pneumonia, bacteremia, sepsis, pyelonephritis, cellulitis, osteomyelitis, meningitis and viral hepatitis; malignant and idiopathic processes that involve systemic immune reaction or proliferation of immune cells, including granulomatous disorders, Wegener's granulomatosis, lymphomatoid granulomatosis/polymorphic reticulosis, idiopathic midline granuloma, multiple myeloma, Waldenstrom's macroglobulinemia, Castleman's disease, histiocytosis.

128. A method for detecting a marker-detectable disease, comprising detecting overexpression of the polypeptide comprising the polypeptide sequence set forth in a member selected from the group consisting of SEQ ID NOs: 165, 166, 317-322, 364-369, 401-404, 427-429, 464-468, 642, 643, 650-664 in a sample from a patient.

129. The method of claim 128, wherein said detecting comprises detecting binding of an antibody to specifically bind to an isolated polynucleotide comprising the polynucleotide sequence set forth in a member selected from the group consisting of SEQ ID NOs: 10, 11, 13, 26, 93, 96, 99, 120, 123, 126, 144, 147, 150-163, 247, 250-315, 325, 328, 331, 334, 337-362, 370, 375, 378, 381, 384, 387-399, 407, 410-425, 432-462, 471, 474, 477, 550, 552, 557, 560, 563, 585, 588, 591, 624, 627, 630 and 698, or a sequence at least about 95% identical thereto, wherein the polypeptide comprising the polypeptide sequence set forth in a member selected from the group consisting of SEQ ID NOs: 165, 166, 317-322, 364-369, 401-404, 427-429, 464-468, 642, 643, 650-664 in a sample from a patient.

130. The method of claim 128 wherein the marker-detectable disease is cancer, and is selected from the group consisting of ovarian cancer, breast cancer, colon cancer, lung cancer and prostate cancer, and wherein the cancer is invasive or metastatic.

131. The method of claim 130, wherein the disease is ovarian cancer and the method further comprises determining one or more of the following: detecting a condition selected from the group consisting of invasive ovarian cancer, metastatic ovarian cancer, a non-ovarian cancer condition elevating serum levels of one or more ovary related markers; identifying a metastasis of unknown origin originating from a primary ovarian cancer, distinguishing between different types of ovarian cancer, differentially diagnosing benign or malignant ovarian cysts; correlating ovarian cancer stage and/or malignant potential; differentially diagnosing ovarian cancer or a non-ovarian cancer selected from the group consisting of benign (functional) ovarian cyst, uterine fibroids, endometriosis, benign ovarian neoplasms or inflammatory bowel lesions; or determining whether ovarian cancer causes a condition suggestive of a malignant tumor selected from the group consisting of anorexia, cachexia, weight loss, fever, hypercalcemia, skeletal or abdominal pain, paraneoplastic syndrome; or ascites.

132. The method of claim 131, wherein said metastasis of unknown origin comprises one or more of gastric carcinoma, breast cancer, colorectal carcinoma or pancreatic carcinoma.

133. The method of claim 132, wherein said non-ovarian cancer condition elevating serum levels of one or more ovary related markers comprises one or more of cancers of the endometrium, cervix, fallopian tubes, pancreas, breast, lung and colon; pregnancy, endometriosis, pelvic inflammatory disease or uterine fibroids.

134. The method of claim 128, wherein the disease is colon cancer and the method further comprises determining one or more of the following: detecting a condition selected from the group consisting of invasive colon cancer, metastatic colon cancer or colon adenocarcinoma.

135. The method of claim 128, wherein the disease is prostate cancer and the method further comprises determining one or more of the following: detecting a condition selected from the group consisting of invasive prostate cancer or metastatic prostate cancer.

136. The method of claim 128, wherein the disease is breast cancer and the method further comprises determining one or more of the following: determining a likely outcome; detecting breast cancer in patients with age above 55 and/or patients with an age below 45; identifying a metastasis of unknown origin which originated from a primary breast cancer tumor; assessing lymphadenopathy; distinguishing between different types of breast cancer; differentially diagnosing between a benign and malignant breast mass; assessing conditions affecting breast skin for differentiation from breast cancer; differentially diagnosing between breast pain or discomfort resulting from either breast cancer or other conditions; differentially diagnosing between breast cancer and one or more of an abnormal mammogram and/or nipple retraction and/or nipple discharge due to causes other than breast cancer; determining whether breast cancer is causing a condition suggestive of a malignant tumor selected from the group consisting of anorexia, cachexia, weight loss, fever, hypercalcemia, paraneoplastic syndrome; differentially diagnosing between breast cancer and one or more of other malignancies, infections and autoimmune diseases.

137. The method of claim 128, wherein the disease is lung cancer and the method further comprises determining one or more of the following: detecting a condition selected from the group consisting of invasive lung cancer, metastatic lung cancer, squamous cell lung carcinoma, lung adenocarcinoma, carcinoid, small cell lung cancer, non-small cell lung cancer; identifying a metastasis of unknown origin which originated from a primary lung cancer; assessing a malignant tissue residing in the lung that is from a non-lung origin; distinguishing between different types of lung cancer; determining a cause of unexplained dyspnea and/or chronic cough and/or hemoptysis; differentially diagnosing origin of a pleural effusion; differentially diagnosing between lung cancer and a non-lung cancer condition selected from the group consisting of non-malignant causes of lung symptoms and signs; lung lesions and infiltrates, wheeze, stridor, tracheal obstruction, esophageal compression, dysphagia, recurrent laryngeal nerve paralysis, hoarseness, phrenic nerve paralysis with elevation of the hemidiaphragm and Horner syndrome; or determining a cause of a condition suggestive of a malignant tumor selected from the group consisting of anorexia, cachexia, weight loss, fever, hypercalcemia, hypophosphatemia, hyponatremia, syndrome of inappropriate secretion of antidiuretic hormone, elevated ANP, elevated ACTH, hypokalemia, clubbing, neurologic-myopathic syndromes and thrombophlebitis.

138. The method of claim 137, wherein said non-lung origin of said malignant tissue in the lung is selected from the group consisting of osteogenic and soft tissue sarcomas; colorectal, uterine, cervix and corpus tumors; head and neck, breast, testis and salivary gland cancers; melanoma; and bladder and kidney tumors.

139. The method of claim 128, wherein the marker-detectable disease is heart disorder, cardiac disease or cardiac pathology, and is selected from the group consisting of: Myocardial infarction; ungina pectoris (stable and unstable); cardiomyopathy; myocarditis; heart failure; congestive heart failure; the detection of reinfarction; the detection of success of thrombolytic therapy after Myocardial infarct; Myocardial infarct after surgery, or assessing the size of infarct in Myocardial infarct; acute coronary syndrome; the differential diagnosis of heart related conditions from lung related conditions (as pulmonary embolism); the differential diagnosis of Dyspnea; cardiac valves related conditions; sudden cardiac death from arrhythmia or any other heart related reason; rejection of a transplanted heart; atrial and ventricular septal defects; conditions that cause atrial and or ventricular wall volume overload, systemic arterial hypertension.

140. The method of claim 128, wherein the marker-detectable disease is cerebrovascular disease, and is selected from the group consisting of: stroke; ischemic stroke; thrombotic stroke; embolic stroke; lacunar stroke; hypoperfusion stroke; hemorrhagic stroke; transient ischemic attacks; neural tissue injury; brain trauma; and any type of cerebrovascular accident.

141. The method of claim 128, wherein the marker-detectable disease is acute and chronic inflammation is selected from the group consisting of hypercholesterolemia, diabetes, atherosclerosis, acute or chronic inflammation that involves blood vessels, including coronary arteries and blood vessels of the brain, cerebral stroke, peripheral vascular disease, vasculitis, polyarteritis nodosa, ANCA associated small vessel vasculitis, Churg-Strauss syndrome, Henoch-Schonlein purpura, scleroderma, thromboangiitis obliterans, temporal arteritis, Takayasu's arteritis, hypersensitivity vasculitis, Kawasaki disease, Behçet syndrome, and their complications including coronary disease, angina pectoris, deep vein thrombosis, renal disease, diabetic nephropathy, lupus nephritis, renal artery thrombosis, renal artery stenosis, atheroembolic disease of the renal arteries, renal vein thrombosis, hemolytic uremic syndrome, thrombotic thrombocytopenic purpura, arteriolar nephrosclerosis, preeclampsia, eclampsia, albuminuria, microalbuminuria, glomerulonephritis, renal failure, hypertension, uremia, cerebrovascular disease, peripheral vascular disease, intermittent claudication, abdominal angina; rheumatic/autoimmune diseases that involve systemic immune reaction including rheumatoid arthritis, scleroderma, mixed connective tissue disease, Sjogren syndrome, ankylosing spondylitis, spondyloarthropathy, psoriasis, psoriatic arthritis, myositis and systemic lupus erythematosus; acute or chronic infective processes that involve systemic immune reaction, including pneumonia, bacteremia, sepsis, pyelonephritis, cellulitis, osteomyelitis, meningitis and viral hepatitis; malignant and idiopathic processes that involve systemic immune reaction or proliferation of immune cells, including granulomatous disorders, Wegener's granulomatosis, lymphomatoid granulomatosis/polymorphic reticulosis, idiopathic midline granuloma, multiple myeloma, Waldenstrom's macroglobulinemia, Castleman's disease, histiocytosis.

142. A biomarker for detecting a marker-detectable disease, comprising an amino acid sequence of claim 95, marked with a label.

143. A method to screen for or to diagnose a marker-detectable disease, comprising detecting the disease with the biomarker of claim 142.

144. A method for monitoring disease progression, treatment efficacy or relapse of a marker-detectable disease, comprising detecting the disease with the biomarker of claim 142.

145. A method of selecting a therapy for a marker-detectable disease, comprising detecting the disease with the biomarker of claim 142 and selecting a therapy according to said detection.

146. A biomarker for detecting a marker-detectable disease, comprising a nucleotide acid sequence set forth in a member selected from the group consisting of SEQ ID NOs: 10, 11, 13, 26, 93, 96, 99, 120, 123, 126, 144, 147, 150-163, 247, 250-315, 325, 328, 331, 334, 337-362, 370, 375, 378, 381, 384, 387-399, 407, 410-425, 432-462, 471, 474, 477, 550, 552, 557, 560, 563, 585, 588, 591, 624, 627, 630 and 698, or a sequence at least about 95% identical thereto.

147. A method to screen for or to diagnose a marker-detectable disease, comprising detecting the disease with the biomarker of claim 146.

148. A method for monitoring disease progression, treatment efficacy or relapse of a marker-detectable disease, comprising detecting the disease with the biomarker of claim 146.

149. A method of selecting a therapy for a marker-detectable disease, comprising detecting the disease with the biomarker of claim 146 and selecting a therapy according to said detection.

The application's sequence listing, which the Patent Office published only in electronic form, follows.

SEQUENCE LISTING (701 sequences)

SEQ ID NO: 1 - DNA, 541 bp, Homo sapiens
cttttcgatccgccatctgcggtggagccgccaccaaaatgcagattttcgtgaaaacccttacggggaagaccatcaccctcgaggttgaaccctcggatacgatagaaaatgtaaaggccaagatccaggataaggaaggaattcctcctgatcagcagagactgatctttgctggcaagcagctggaagatggacgtactttgtctgactacaatattcaaaaggagtctactcttcatcttgtgttgagacttcgtggtggtgctaagaaaaggaagaagaagtcttacaccactcccaagaagaataagcacaagagaaagaaggttaagctggctgtcctgaaatattataaggtggatgagaatggcaaaattagtcgccttcgtcgagagtgcccttctgatgaatgtggtgctggggtgtttatggcaagtcactttgacagacattattgtggcaaatgttgtctgacttactgtttcaacaaaccagaagacaagtaactgtatgagttaataaaagacatgaactaaca

SEQ ID NO: 2 - DNA, 1867 bp, Homo sapiens
ggttcgctgtggcgggcgcctgggccgccggctgtttaacttcgcttccgctggcccatagtgatctttgcagtgacccagcagcatcactgtttcttggcgtgtgaagataacccaaggaattgaggaagttgctgagaagagtgtgctggagatgctctaggaaaaaattgaatagtgagacgagttccagcgcaagggtttctggtttgccaagaagaaagtgaacatcatggatcagaacaacagcctgccaccttacgctcagggcttggcctcccctcagggtgccatgactcccggaatccctatctttagtccaatgatgccttatggcactggactgaccccacagcctattcagaacaccaatagtctgtctattttggaagagcaacaaaggcagcagcagcaacaacaacagcagcagcagcagcagcagcagcaacagcaacagcagcagcagcagcagcagcagcagcagcagcagcagcagcagcagcagcagcagcaacaggcagtggcagctgcagccgttcagcagtcaacgtcccagcaggcaacacagggaacctcaggccaggcaccacagctcttccactcacagactctcacaactgcacccttgccgggcaccactccactgtatccctcccccatgactcccatgacccccatcactcctgccacgccagcttcggagagttctgggattgtaccgcagctgcaaaatattgtatccacagtgaatcttggttgtaaacttgacctaaagaccattgcacttcgtgcccgaaacgccgaatataatcccaagcggtttgctgcggtaatcatgaggataagagagccacgaaccacggcactgattttcagttctgggaaaatggtgtgcacaggagccaagagtgaagaacagtccagactggcagcaagaaaatatgctagagttgtacagaagttgggttttccagctaagttcttggacttcaagattcagaatatggtggggagctgtgatgtgaagtttcctataaggttagaaggccttgtgctcacccaccaacaatttagtagttatgagccagagttatttcctggtttaatctacagaatgatcaaacccagaattgttctccttatttttgtttctggaaaagttgtattaacaggtgctaaagtcagagcagaaatttatgaagcatttgaaaacatctaccctattctaaagggattcaggaagacgacgtaatggctctcatgtacccttgcctcccccacccccttctttttttttttttaaacaaatcagtttgttttggtacctttaaatggtggtgttgtgagaagatggatgttgagttgcagggtgtggcaccaggtgatgcccttctgtaagtgcccaccgcgggatgccgggaaggggcattatttgtgcactgagaacaccgcgcagcgtgactgtgagttgctcataccgtgctgctatctgggcagcgctgcccatttatttatatgtagattttaaacactgctgttgacaagttggtttgagggagaaaactttaagtgttaaagccacctctataattgattggactttttaattttaatgtttttccccatgaaccacagtttttatatttctaccagaaaagtaaaaatcttttttaaaagtgttgtttttctaatttataactcctaggggttatttctgtgccagacacattccacctctccagtattgcaggacagaatatatgtgttaatgaaaatgaatggctgtacatatttttttctttcttcagagtactctgtacaataaatgcagtttataaaagtgttaaaaaaaaaaaaaaaaaaaaaa

SEQ ID NO: 3 - DNA, 1261 bp, Homo sapiens
cttttgcgtcgccagccgagccacatcgctcagacaccatggggaaggtgaaggtcggagtcaacggatttggtcgtattgggcgcctggtcaccagggctgcttttaactctggtaaagtggatattgttgccatcaatgaccccttcattgacctcaactacatggtttacatgttccaatatgattccacccatggcaaattccatggcaccgtcaaggctgagaacgggaagcttgtcatcaatggaaatcccatcaccatcttccaggagcgagatccctccaaaatcaagtggggcgatgctggcgctgagtacgtcgtggagtccactggcgtcttcaccaccatggagaaggctggggctcatttgcaggggggagccaaaagggtcatcatctctgccccctctgctgatgcccccatgttcgtcatgggtgtgaaccatgagaagtatgacaacagcctcaagatcatcagcaatgcctcctgcaccaccaactgcttagcacccctggccaaggtcatccatgacaactttggtatcgtggaaggactcatgaccacagtccatgccatcactgccacccagaagactgtggatggcccctccgggaaactgtggcgtgatggccgcggggctctccagaacatcatccctgcctctactggcgctgccaaggctgtgggcaaggtcatccctgagctgaacgggaagctcactggcatggccttccgtgtccccactgccaacgtgtcagtggtggacctgacctgccgtctagaaaaacctgccaaatatgatgacatcaagaaggtggtgaagcaggcgtcggagggccccctcaagggcatcctgggctacactgagcaccaggtggtctcctctgacttcaacagcgacacccactcctccacctttgacgctggggctggcattgccctcaacgaccactttgtcaagctcatttcctggtatgacaacgaatttggctacagcaacagggtggtggacctcatggcccacatggcctccaaggagtaagacccctggaccaccagccccagcaagagcacaagaggaagagagagaccctcactgctggggagtccctgccacactcagtcccccaccacactgaatctcccctcctcacagttgccatgtagaccccttgaagaggggaggggcctagggagccgcaccttgtcatgtaccatcaataaagtaccctgtgctcaaccaaaaaaaaaaaaaaa

SEQ ID NO: 4 - DNA, 2277 bp, Homo sapiens
gactgcgcggcggcaacagcagacatgtcgggggtccggggcctgtcgcggctgctgagcgctcggcgcctggcgctggccaaggcgtggccaacagtgttgcaaacaggaacccgaggttttcacttcactgttgatgggaacaagagggcatctgctaaagtttcagattccatttctgctcagtatccagtagtggatcatgaatttgatgcagtggtggtaggcgctggaggggcaggcttgcgagctgcatttggcctttctgaggcagggtttaatacagcatgtgttaccaagctgtttcctaccaggtcacacactgttgcagcgcagggaggaatcaatgctgctctggggaacatggaggaggacaactggaggtggcatttctacgacaccgtgaagggctccgactggctgggggaccaggatgccatccactacatgacggagcaggcccccgccgccgtggtcgagctagaaaattatggcatgccgtttagcagaactgaagatgggaagatttatcagcgtgcatttggtggacagagcctcaagtttggaaagggcgggcaggcccatcggtgctgctgtgtggctgatcggactggccactcgctattgcacaccttatatggacggtctctgcgatatgataccagctattttgtggagtattttgccttggatctcctgatggagaacggggagtgccgtggtgtcatcgcactgtgcatagaggacgggtccatccatcgcataagagcaaagaacactgttgttgccacaggaggctacgggcgcacctacttcagctgcacgtctgcccacaccagcactggcgacggcacggccatgatcaccagggcaggccttccttgccaggacctagagtttgttcagttccaccccacaggcatatatggtgctggttgtctcattacggaaggatgtcgtggagagggaggcattctcattaacagtcaaggcgaaaggtttatggagcgatacgcccctgtcgcgaaggacctggcgtctagagatgtggtgtctcggtcgatgactctggagatccgagaaggaagaggctgtggccctgagaaagatcacgtctacctgcagctgcaccacctacctccagagcagctggccacgcgcctgcctggcatttcagagacagccatgatcttcgctggcgtggacgtcacgaaggagccgatccctgtcctccccaccgtgcattataacatgggcggcattcccaccaactacaaggggcaggtcctgaggcacgtgaatggccaggatcagattgtgcccggcctgtacgcctgtggggaggccgcctgtgcctcggtacatggtgccaaccgcctcggggcaaactcgctcttggacctggttgtctttggtcgggcatgtgccctgagcatcgaagagtcatgcaggcctggagataaagtccctccaattaaaccaaacgctggggaagaatctgtcatgaatcttgacaaattgagatttgctgatggaagcataagaacatcggaactgcgactcagcatgcagaagtcaatgcaaaatcatgctgccgtgttccgtgtgggaagcgtgttgcaagaaggttgtgggaaaatcagcaagctctatggagacctaaagcacctgaagacgttcgaccggggaatggtctggaacacagacctggtggagaccctggagctgcagaacctgatgctgtgtgcgctgcagaccatctacggagcagaggcgcggaaggagtcacggggcgcgcatgccagggaagactacaaggtgcggattgatgagtacgattactccaagcccatccaggggcaacagaagaagccctttgaggagcactggaggaagcacaccctgtcctttgtggacgttggcactgggaaggtcactctggaatatagacccgtaatcgacaaaactttgaacgaggctgactgtgccaccatcccgccagccattcgctcctactgatgagacaagatgtggtgatgacagaatcagcttttgtaattatgtataatagctcatgcatgtgtccatgtcataactgtcttcatacgcttctgcactctggggaagaaggagtacattgaagggagattggcacctagtggctgggagcttgccaggaacccagtggccagggagcgtggcacttacctttgtcccttgcttcattcttgtgagatgataaaactgggcacagctcttaaataaaatataaatgag

SEQ ID NO: 5 - DNA, 1331 bp, Homo sapiens
tcttgctgcgcctccgcctcctcctctgctccgccaccggcttcctcctcctgagcagtcagcccgcgcgccggccggctccgttatggcgacccgcagccctggcgtcgtgattagtgatgatgaaccaggttatgaccttgatttattttgcatacctaatcattatgctgaggatttggaaagggtgtttattcctcatggactaattatggacaggactgaacgtcttgctcgagatgtgatgaaggagatgggaggccatcacattgtagccctctgtgtgctcaaggggggctataaattctttgctgacctgctggattacatcaaagcactgaatagaaatagtgatagatccattcctatgactgtagattttatcagactgaagagctattgtaatgaccagtcaacaggggacataaaagtaattggtggagatgatctctcaactttaactggaaagaatgtcttgattgtggaagatataattgacactggcaaaacaatgcagactttgctttccttggtcaggcagtataatccaaagatggtcaaggtcgcaagcttgctggtgaaaaggaccccacgaagtgttggatataagccagactttgttggatttgaaattccagacaagtttgttgtaggatatgcccttgactataatgaatacttcagggatttgaatcatgtttgtgtcattagtgaaactggaaaagcaaaatacaaagcctaagatgagagttcaagttgagtttggaaacatctggagtcctattgacatcgccagtaaaattatcaatgttctagttctgtggccatctgcttagtagagctttttgcatgtatcttctaagaattttatctgttttgtactttagaaatgtcagttgctgcattcctaaactgtttatttgcactatgagcctatagactatcagttccctttgggcggattgttgtttaacttgtaaatgaaaaaattctcttaaaccacagcactattgagtgaaacattgaactcatatctgtaagaaataaagagaagatatattagttttttaattggtattttaatttttatatatgcaggaaagaatagaagtgattgaatattgttaattataccaccgtgtgttagaaaagtaagaagcagtcaattttcacatcaaagacagcatctaagaagttttgttctgtcctggaattattttagtagtgtttcagtaatgttgactgtattttccaacttgttcaaattattaccagtgaatctttgtcagcagttcccttttaaatgcaaatcaataaattcccaaaaattt

SEQ ID NO: 6 - DNA, 1536 bp, Homo sapiens
gtgacgcgaggctctgcggagaccaggagtcagactgtaggacgacctcgggtcccacgtgtccccggtactcgccggccggagcccccggcttcccggggccgggggaccttagcggcacccacacacagcctactttccaagcggagccatgtctggtaacggcaatgcggctgcaacggcggaagaaaacagcccaaagatgagagtgattcgcgtgggtacccgcaagagccagcttgctcgcatacagacggacagtgtggtggcaacattgaaagcctcgtaccctggcctgcagtttgaaatcattgctatgtccaccacaggggacaagattcttgatactgcactctctaagattggagagaaaagcctgtttaccaaggagcttgaacatgccctggagaagaatgaagtggacctggttgttcactccttgaaggacctgcccactgtgcttcctcctggcttcaccatcggagccatctgcaagcgggaaaaccctcatgatgctgttgtctttcacccaaaatttgttgggaagaccctagaaaccctgccagagaagagtgtggtgggaaccagctccctgcgaagagcagcccagctgcagagaaagttcccgcatctggagttcaggagtattcggggaaacctcaacacccggcttcggaagctggacgagcagcaggagttcagtgccatcatcctggcaacagctggcctgcagcgcatgggctggcacaaccgggtggggcagatcctgcaccctgaggaatgcatgtatgctgtgggccagggggccttgggcgtggaagtgcgagccaaggaccaggacatcttggatctggtgggtgtgctgcacgatcccgagactctgcttcgctgcatcgctgaaagggccttcctgaggcacctggaaggaggctgcagtgtgccagtagccgtgcatacagctatgaaggatgggcaactgtacctgactggaggagtctggagtctagacggctcagatagcatacaagagaccatgcaggctaccatccatgtccctgcccagcatgaagatggccctgaggatgacccacagttggtaggcatcactgctcgtaacattccacgagggccccagttggctgcccagaacttgggcatcagcctggccaacttgttgctgagcaaaggagccaaaaacatcctggatgttgcacggcagcttaacgatgcccattaactggtttgtggggcacagatgcctgggttgctgctgtccagtgcctacatcccgggcctcagtgccccattctcactgctatctggggagtgattaccccgggagactgaactgcagggttcaagccttccagggatttgcctcaccttggggccttgatgactgccttgcctcctcagtatgtgggggcttcatctctttagagaagtccaagcaacagcctttgaatgtaaccaatcctactaataaaccagttctgaaggtaaaaaaaaaaaaaaaaaaaaaaaaaaaaaaaaaaa

SEQ ID NO: 7 - DNA, 748 bp, Homo sapiens
gcagataatgggaggagccgggcccgagcgagctctttcctttcgctgctgcggccgcagccatgagtatgctcaggcttcagaagaggctcgcctctagtgtcctccgctgtggcaagaagaaggtctggttagaccccaatgagaccaatgaaatcgccaatgccaactcccgtcagcagatccggaagctcatcaaagatgggctgatcatccgcaagcctgtgacggtccattcccgggctcgatgccggaaaaacaccttggcccgccggaagggcaggcacatgggcataggtaagcggaagggtacagccaatgcccgaatgccagagaaggtcacatggatgaggagaatgaggattttgcgccggctgctcagaagataccgtgaatctaagaagatcgatcgccacatgtatcacagcctgtacctgaaggtgaaggggaatgtgttcaaaaacaagcggattctcatggaacacatccacaagctgaaggcagacaaggcccgcaagaagctcctggctgaccaggctgaggcccgcaggtctaagaccaaggaagcacgcaagcgccgtgaagagcgcctccaggccaagaaggaggagatcatcaagactttatccaaggaggaagagaccaagaaataaaacctcccactttgtctgtacatactggcctctgtgattacatagatcagccattaaaataaaacaagccttaatctgcaaaaaaaaaaaaaaaa

SEQ ID NO: 8 - DNA, 2650 bp, Homo sapiens
agggacagcccagaggaggcgtggccacgctgccggcggaagtggagccctccgcgagcgcgcgaggccgccggggcaggcggggaaaccggacagtaggggcggggccgggccggcgatggggatgcgggagcactacgcggagctgcacccgtgcccgccggaattggggatgcagagcagcggcagcgggtatggcaggcagccggcgggccggcctccagcgcaggtgcccgagaggcaggggctggcctgggatgcgcgcgcacctgccctcgccccgccccgcccgcacgaggggtggtggccgaggccccgccccgcacgcctcgcctgaggcgggtccgctcagcccaggcgcccgcccccgcccccgccgattaaatgggccggcggggctcagcccccggaaacggtcgtaacttcggggctgcgagcgcggagggcgacgacgacgaagcgcagacagcgtcatggcagagcaggtggccctgagccggacccaggtgtgcgggatcctgcgggaagagcttttccagggcgatgccttccatcagtcggatacacacatattcatcatcatgggtgcatcgggtgacctggccaagaagaagatctaccccaccatctggtggctgttccgggatggccttctgcccgaaaacaccttcatcgtgggctatgcccgttcccgcctcacagtggctgacatccgcaaacagagtgagcccttcttcaaggccaccccagaggagaagctcaagctggaggacttctttgcccgcaactcctatgtggctggccagtacgatgatgcagcctcctaccagcgcctcaacagccacatggatgccctccacctggggtcacaggccaaccgcctcttctacctggccttgcccccgaccgtctacgaggccgtcaccaagaacattcacgagtcctgcatgagccagataggctggaaccgcatcatcgtggagaagcccttcgggagggacctgcagagctctgaccggctgtccaaccacatctcctccctgttccgtgaggaccagatctaccgcatcgaccactacctgggcaaggagatggtgcagaacctcatggtgctgagatttgccaacaggatcttcggccccatctggaaccgggacaacatcgcctgcgttatcctcaccttcaaggagccctttggcactgagggtcgcgggggctatttcgatgaatttgggatcatccgggacgtgatgcagaaccacctactgcagatgctgtgtctggtggccatggagaagcccgcctccaccaactcagatgacgtccgtgatgagaaggtcaaggtgttgaaatgcatctcagaggtgcaggccaacaatgtggtcctgggccagtacgtggggaaccccgatggagagggcgaggccaccaaagggtacctggacgaccccacggtgccccgcgggtccaccaccgccacttttgcagccgtcgtcctctatgtggagaatgagaggtgggatggggtgcccttcatcctgcgctgcggcaaggccctgaacgagcgcaaggccgaggtgaggctgcagttccatgatgtggccggcgacatcttccaccagcagtgcaagcgcaacgagctggtgatccgcgtgcagcccaacgaggccgtgtacaccaagatgatgaccaagaagccgggcatgttcttcaaccccgaggagtcggagctggacctgacctacggcaacagatacaagaacgtgaagctccctgacgcctacgagcgcctcatcctggacgtcttctgcgggagccagatgcacttcgtgcgcagcgacgagctccgtgaggcctggcgtattttcaccccactgctgcaccagattgagctggagaagcccaagcccatcccctatatttatggcagccgaggccccacggaggcagacgagctgatgaagagagtgggtttccagtatgagggcacctacaagtgggtgaacccccacaagctctgagccctgggcacccacctccacccccgccacggccaccctccttcccgccgcccgaccccgagtcgggaggactccgggaccattgacctcagctgcacattcctggccccgggctctggccaccctggcccgcccctcgctgctgctactacccgagcccagctacattcctcagctgccaagcactcgagaccatcctggcccctccagaccctgcctgagcccaggagctgagtcacctcctccactcactccagcccaacagaaggaaggaggagggcgcccattcgtctgtcccagagcttattggccactgggtctcactcctgagtggggccagggtgggagggagggacaagggggaggaaaggggcgagcacccacgtgagagaatctgcctgtggccttgcccgccagcctcagtgccacttgacattccttgtcaccagcaacatctcgagccccctggatgtcccctgtcccaccaactctgcactccatggccaccccgtgccacccgtaggcagcctctctgctataagaaaagcagacgcagcagctgggacccctcccaacctcaatgccctgccattaaatccgcaaacagccaaaaaaaaaaaaaaaaaaaa

SEQ ID NO: 9 - DNA, 2201 bp, Homo sapiens
cgggatttgggtcgcggttcttgtttgtggatcgctgtgatcgtcacttgacaatgcagatcttcgtgaagactctgactggtaagaccatcaccctcgaggttgagcccagtgacaccatcgagaatgtcaaggcaaagatccaagataaggaaggcatccctcctgaccagcagaggctgatctttgctggaaaacagctggaagatgggcgcaccctgtctgactacaacatccagaaagagtccaccctgcacctggtgctccgtctcagaggtgggatgcaaatcttcgtgaagacactcactggcaagaccatcacccttgaggtggagcccagtgacaccatcgagaacgtcaaagcaaagatccaggacaaggaaggcattcctcctgaccagcagaggttgatctttgccggaaagcagctggaagatgggcgcaccctgtctgactacaacatccagaaagagtctaccctgcacctggtgctccgtctcagaggtgggatgcagatcttcgtgaagaccctgactggtaagaccatcaccctcgaggtggagcccagtgacaccatcgagaatgtcaaggcaaagatccaagataaggaaggcattcctcctgatcagcagaggttgatctttgccggaaaacagctggaagatggtcgtaccctgtctgactacaacatccagaaagagtccaccttgcacctggtactccgtctcagaggtgggatgcaaatcttcgtgaagacactcactggcaagaccatcacccttgaggtcgagcccagtgacactatcgagaacgtcaaagcaaagatccaagacaaggaaggcattcctcctgaccagcagaggttgatctttgccggaaagcagctggaagatgggcgcaccctgtctgactacaacatccagaaagagtctaccctgcacctggtgctccgtctcagaggtgggatgcagatcttcgtgaagaccctgactggtaagaccatcaccctcgaagtggagccgagtgacaccattgagaatgtcaaggcaaagatccaagacaaggaaggcatccctcctgaccagcagaggttgatctttgccggaaaacagctggaagatggtcgtaccctgtctgactacaacatccagaaagagtccaccttgcacctggtgctccgtctcagaggtgggatgcagatcttcgtgaagaccctgactggtaagaccatcactctcgaggtggagccgagtgacaccattgagaatgtcaaggcaaagatccaagacaaggaaggcatccctcctgatcagcagaggttgatctttgctgggaaacagctggaagatggacgcaccctgtctgactacaacatccagaaagagtccaccctgcacctggtgctccgtcttagaggtgggatgcagatcttcgtgaagaccctgactggtaagaccatcactctcgaagtggagccgagtgacaccattgagaatgtcaaggcaaagatccaagacaaggaaggcatccctcctgaccagcagaggttgatctttgctgggaaacagctggaagatggacgcaccctgtctgactacaacatccagaaagagtccaccctgcacctggtgctccgtcttagaggtgggatgcagatcttcgtgaagaccctgactggtaagaccatcactctcgaagtggagccgagtgacaccattgagaatgtcaaggcaaagatccaagacaaggaaggcatccctcctgaccagcagaggttgatctttgctgggaaacagctggaagatggacgcaccctgtctgactacaacatccagaaagagtccaccctgcacctggtgctccgtctcagaggtgggatgcagatcttcgtgaagaccctgactggtaagaccatcaccctcgaggtggagcccagtgacaccatcgagaatgtcaaggcaaagatccaagataaggaaggcatccctcctgatcagcagaggttgatctttgctgggaaacagctggaagatggacgcaccctgtctgactacaacatccagaaagagtccactctgcacttggtcctgcgcttgagggggggtgtctaagtttccccttttaaggtttcaacaaatttcattgcactttcctttcaataaagttgttgcattcccaaaaaaaaaaaaaaaaaaaaaaaa

SEQ ID NO: 10 - DNA, 50 bp, Homo sapiens
gctgatatggaagttggggaatctgaattgccagagaatcttgggaagag

SEQ ID NO: 11 - DNA, 50 bp, Homo sapiens
tctcatagaagcaaaggagaacagaaaccaccagccacctcaacccaagg

SEQ ID NO: 12 - DNA, 50 bp, Homo sapiens
cttcctacacacatctagacgttcaagtttgcaaatcagtttttagcaag

SEQ ID NO: 13 - DNA, 50 bp, Homo sapiens
gttcccatctgccccacgccccacttatctatccctctgagagtgtgtgt

SEQ ID NO: 14 - DNA, 50 bp, Homo sapiens
ccagatcatagacgaagaagaaactcagtttatgagcaattgccctgttg

SEQ ID NO: 15 - DNA, 50 bp, Homo sapiens; identical to SEQ ID NO: 12

SEQ ID NO: 16 - DNA, 50 bp, Homo sapiens
gagaagatgaacccgctggaacagtatgagcgaaaggtgaatgcgtctgt

SEQ ID NO: 17 - DNA, 50 bp, Homo sapiens
cacagagccaggatgttcttctgacctcagtatctactccagctccagct

SEQ ID NO: 18 - DNA, 50 bp, Homo sapiens
tggcatgctggaacatggactctagctagcaagaagggctcaaggaggtg

SEQ ID NO: 19 - DNA, 50 bp, Homo sapiens
cctctggggtaggttactatcctctttgtcctgccagtacccctagaaat

SEQ ID NO: 20 - DNA, 50 bp, Homo sapiens
ttggtgtttcggcatggagaccgaagtcccattgacacctttcccactga

SEQ ID NO: 21 - DNA, 50 bp, Homo sapiens
atgaggggagattgccttccactacacataagtatggtcaagtatgaaat

SEQ ID NO: 22 - DNA, 50 bp, Homo sapiens
aaaaggagacttcggctacccagagaagttcagtgcccagctctactgag

SEQ ID NO: 23 - DNA, 50 bp, Homo sapiens
aaaggctggcatagggggaggtttcccaggtagaagaagaagtgtcagca

SEQ ID NO: 24 - DNA, 50 bp, Homo sapiens
aattaaccctttgagagctggccaggactctggactgattaccccagcct

SEQ ID NO: 25 - DNA, 50 bp, Homo sapiens
ggaacattctggatctgaccctcccagtctcatctcctgaccctcccact

SEQ ID NO: 26 - DNA, 50 bp, Homo sapiens
cctccccttttccacacgaaccttgtggggctgtgaattctttcttcatc

SEQ ID NO: 27 - DNA, 20 bp, Artificial sequence
  Synthetic oligonucleotide
tgggaacaagagggcatctg

SEQ ID NO: 28 - DNA, 22 bp, Artificial sequence
  Synthetic oligonucleotide
ccaccactgcatcaaattcatg

SEQ ID NO: 29 - DNA, 86 bp, Artificial sequence
  Synthetic oligonucleotide
tgggaacaagagggcatctgctaaagtttcagattccatttctgctcagtatccagtagtggatcatgaatttgatgcagtggtgg

SEQ ID NO: 30 - DNA, 19 bp, Artificial sequence
  Synthetic oligonucleotide
tgagagtgattcgcgtggg

SEQ ID NO: 31 - DNA, 21 bp, Artificial sequence
  Synthetic oligonucleotide
ccagggtacgaggctttcaat

SEQ ID NO: 32 - DNA, 91 bp, Artificial sequence
  Synthetic oligonucleotide
tgagagtgattcgcgtgggtacccgcaagagccagcttgctcgcatacagacggacagtgtggtggcaacattgaaagcctcgtaccctgg

SEQ ID NO: 33 - DNA, 21 bp, Artificial sequence
  Synthetic oligonucleotide
tgacactggcaaaacaatgca

SEQ ID NO: 34 - DNA, 21 bp, Artificial sequence
  Synthetic oligonucleotide
ggtccttttcaccagcaagct

SEQ ID NO: 35 - DNA, 94 bp, Artificial sequence
  Synthetic oligonucleotide
tgacactggcaaaacaatgcagactttgctttccttggtcaggcagtataatccaaagatggtcaaggtcgcaagcttgctggtgaaaaggacc

SEQ ID NO: 36 - DNA, 23 bp, Artificial sequence
  Synthetic oligonucleotide
tggcaagaagaaggtctggttag

SEQ ID NO: 37 - DNA, 22 bp, Artificial sequence
  Synthetic oligonucleotide
tgatcagcccatctttgatgag

SEQ ID NO: 38 - DNA, 101 bp, Artificial sequence
  Synthetic oligonucleotide
tggcaagaagaaggtctggttagaccccaatgagaccaatgaaatcgccaatgccaactcccgtcagcagatccggaagctcatcaaagatgggctgatca

SEQ ID NO: 39 - DNA, 20 bp, Artificial sequence
  Synthetic oligonucleotide
tgcaccaccaactgcttagc

SEQ ID NO: 40 - DNA, 19 bp, Artificial sequence
  Synthetic oligonucleotide
ccatcacgccacagtttcc

SEQ ID NO: 41 - DNA, 116 bp, Artificial sequence
  Synthetic oligonucleotide
tgcaccaccaactgcttagcacccctggccaaggtcatccatgacaactttggtatcgtggaaggactcatgaccacagtccatgccatcactgccacccagaagactgtggatgg

SEQ ID NO: 42 - DNA, 20 bp, Artificial sequence
  Synthetic oligonucleotide
gaggccgtcaccaagaacat

SEQ ID NO: 43 - DNA, 19 bp, Artificial sequence
  Synthetic oligonucleotide
ggacagccggtcagagctc

SEQ ID NO: 44 - DNA, 111 bp, Artificial sequence
  Synthetic oligonucleotide
gaggccgtcaccaagaacattcacgagtcctgcatgagccagataggctggaaccgcatcatcgtggagaagcccttcgggagggacctgcagagctctgaccggctgtcc

SEQ ID NO: 45 - DNA, 20 bp, Artificial sequence
  Synthetic oligonucleotide
ctggcaagcagctggaagat

SEQ ID NO: 46 - DNA, 23 bp, Artificial sequence
  Synthetic oligonucleotide
tttcttagcaccaccacgaagtc

SEQ ID NO: 47 - DNA, 101 bp, Artificial sequence
  Synthetic oligonucleotide
ctggcaagcagctggaagatggacgtactttgtctgactacaatattcaaaaggagtctactcttcatcttgtgttgagacttcgtggtggtgctaagaaa

SEQ ID NO: 48 - DNA, 19 bp, Artificial sequence
  Synthetic oligonucleotide
atttgggtcgcggttcttg

SEQ ID NO: 49 - DNA, 21 bp, Artificial sequence
  Synthetic oligonucleotide
tgccttgacattctcgatggt

SEQ ID NO: 50 - DNA, 133 bp, Artificial sequence
  Synthetic oligonucleotide
atttgggtcgcggttcttgtttgtggatcgctgtgatcgtcacttgacaatgcagatcttcgtgaagactctgactggtaagaccatcaccctcgaggttgagcccagtgacaccatcgagaatgtcaaggca

SEQ ID NO: 51 - DNA, 20 bp, Artificial sequence
  Synthetic oligonucleotide
cggtttgctgcggtaatcat

SEQ ID NO: 52 - DNA, 21 bp, Artificial sequence
  Synthetic oligonucleotide
tttcttgctgccagtctggac

SEQ ID NO: 53 - DNA, 122 bp, Artificial sequence
  Synthetic oligonucleotide
cggtttgctgcggtaatcatgaggataagagagccacgaaccacggcactgattttcagttctgggaaaatggtgtgcacaggagccaagagtgaagaacagtccagactggcagcaagaaa

SEQ ID NO: 54 - DNA, 2778 bp, Homo sapiens
atgcgtgcgtgcgtgcgtgcgtgtgtgtgtgtgtgtgcctctgctctttgtcctgagcccacgattccagagctggctggacccaaggaggtgaagagtcacttttcagccccaggaagggcaaagaagagagaaaatcagcctgtctgctctctccttggctcaacaaggcctctaacagtcttctgtcctctattctgcacacggcatatttgggaacgagaaacaaaagttttcccaaatgaagagaactcacttgtttattgtggggatttattttctgtcctcttgcagggcagaagaggggcttaatttccccacatatgatgggaaggaccgagtggtaagtctttccgagaagaacttcaagcaggttttaaagaaatatgacttgctttgcctctactaccatgagccggtgtcttcagataaggtcacgcaaaaacagttccaactgaaagaaatcgtgcttgagcttgtggcccaggtccttgaacataaagctataggctttgtgatggtggatgccaagaaagaagccaagcttgccaagaaactgggttttgatgaagaaggaagcctgtatattcttaagggtgatcgcacaatagagtttgatggcgagtttgcagctgatgtcttggtggagttcctcttggatctaattgaagacccagtggagatcatcagcagcaaactggaagtccaagccttcgaacgcattgaagactacatcaaactcattggctttttcaagagtgaggactcagaatactacaaggcttttgaagaagcagctgaacacttccagccttacatcaaattctttgccacctttgacaaaggggtgctgtggctcacacctgtaatcccaacactttgggaggctgacgggggtggattgcatgagccttggagttggagaccagcctgggcaacatggttgcaaagaaattatctttgaagatgaatgaggttgacttctatgagccatttatggatgagcccattgccatccccaacaaaccttacacagaagaggagctggtggagtttgtgaaggaacaccaaagacccactctacgtcgcctgcgcccagaagaaatgtttgaaacatgggaagatgatttgaatgggatccacattgtggcctttgcagagaagagtgatccagatggctacgaattcctggagatcctgaaacaggttgcccgggacaatactgacaaccccgatctgagcatcctgtggatcgacccggacgactttcctctgctcgttgcctactgggagaagactttcaagattgacctattcaggccacagattggggtggtgaatgtcacagatgctgacagtgtctggatggagattccagatgatgacgatcttccaactgctgaggagctggaggactggattgaggatgtgctttctggaaagataaacactgaagatgatgatgaagatgatgatgatgatgataattctgatgaagaggataatgatgacagtgatgacgatgatgatgaatagcccaactccaaacaattctgatgaaaacaaaatcacagcacccactaccatacagacagcacaaggtggcagcaagcaattctgccccacacccagccagctcctttcccttttccatcatctcttttcccactccctttgcgtcaggagcagcatcattcagcaaatgccttttcaaatgcagcaatcccacttagcagggacaggagaaaaattattcccatgttgactgtcttgactgtcacggaacagatcttgttctttgctggaccatcaagggtcatggcagtgcctgaacatggcagtctagggtgaacaatcccctaacacaagtttacttgtctttgattatgacagtaacaaaattgacagctttctaactcacaggcatagagtgaccttttaatcagagcccagggaagacacatgattaatgatttagctccctccatacctcgaacatcagttgggatccctcctccagccaagatgatccttcttagagaaggctcagccttggaagcaaacttataaatcatattctcatggctttgttaaacttatttcaagtgatggtcattcatatcactatgaacttggatattcaagcctttggatggctatggagaggccttgaaatgtgtacaggtgtcaccatcatttctagtatattaggaaactgggatgggaggttgatttgctctctaaacttccctctagttggcaagtctcacatattcatcagcaggagtggagggtgggggaaaactagaaagatgaaaacttttacatttttctgatgggttcatgtctctgattgggtcagctggcttcctagcctaagctgggatctgaataccccttctctgtagctgctagtgagccttcccatttagattaaagattgctttatccagcagtcaattaactctccagttatcagtactcccacaattggccagggcaacaataattggagttcatactgatgccctgaggcactgaaaaaaaaaaaaatcccaaagtgccttctgagctgtctaaaagttacattgtgcttggtagatttagtgttaagtgtgcagtataattttctaatttattttctcaatcttttagcacatgtgtaagacactgtgcaaattttttgaaaatagagcaatactttttgtggaatactagctaactaattctgtcattaaactcatattttgaaaatattcagacaatgttgaaaatcct

SEQ ID NO: 55 - DNA, 2824 bp, Homo sapiens
atgcgtgcgtgcgtgcgtgcgtgtgtgtgtgtgtgtgcctctgctctttgtcctgagcccacgattccagagctggctggacccaaggaggtgaagagtcacttttcagccccaggaagggcaaagaagagagaaaatcagcctgtctgctctctccttggctcaacaaggcctctaacagtcttctgtcctctattctgcacacggcatatttgggaacgagaaacaaaagttttcccaaatgaagagaactcacttgtttattgtggggatttattttctgtcctcttgcagggcagaagaggggcttaatttccccacatatgatgggaaggaccgagtggtaagtctttccgagaagaacttcaagcaggttttaaagaaatatgacttgctttgcctctactaccatgagccggtgtcttcagataaggtcacgcaaaaacagttccaactgaaagaaatcgtgcttgagcactggcaaatatcccagtggtggttgcatttccaaaccccaagagaggaaggcaaaatgaagttgctggagttgagtgaatctgcagatggagctgcgtggaaacgctggggagggaatagcaacacacacaggattcagcttgtggcccaggtccttgaacataaagctataggctttgtgatggtggatgccaagaaagaagccaagcttgccaagaaactgggttttgatgaagaaggaagcctgtatattcttaagggtgatcgcacaatagagtttgatggcgagtttgcagctgatgtcttggtggagttcctcttggatctaattgaagacccagtggagatcatcagcagcaaactggaagtccaagccttcgaacgcattgaagactacatcaaactcattggctttttcaagagtgaggactcagaatactacaaggcttttgaagaagcagctgaacacttccagccttacatcaaattctttgccacctttgacaaaggggttgcaaagaaattatctttgaagatgaatgaggttgacttctatgagccatttatggatgagcccattgccatccccaacaaaccttacacagaagaggagctggtggagtttgtgaaggaacaccaaagacccactctacgtcgcctgcgcccagaagaaatgtttgaaacatgggaagatgatttgaatgggatccacattgtggcctttgcagagaagagtgatccagatggctacgaattcctggagatcctgaaacaggttgcccgggacaatactgacaaccccgatctgagcatcctgtggatcgacccggacgactttcctctgctcgttgcctactgggagaagactttcaagattgacctattcaggccacagattggggtggtgaatgtcacagatgctgacagtgtctggatggagattccagatgatgacgatcttccaactgctgaggagctggaggactggattgaggatgtgctttctggaaagataaacactgaagatgatgatgaagatgatgatgatgatgataattctgatgaagaggataatgatgacagtgatgacgatgatgatgaatagcccaactccaaacaattctgatgaaaacaaaatcacagcacccactaccatacagacagcacaaggtggcagcaagcaattctgccccacacccagccagctcctttcccttttccatcatctcttttcccactccctttgcgtcaggagcagcatcattcagcaaatgccttttcaaatgcagcaatcccacttagcagggacaggagaaaaattattcccatgttgactgtcttgactgtcacggaacagatcttgttctttgctggaccatcaagggtcatggcagtgcctgaacatggcagtctagggtgaacaatcccctaacacaagtttacttgtctttgattatgacagtaacaaaattgacagctttctaactcacaggcatagagtgaccttttaatcagagcccagggaagacacatgattaatgatttagctccctccatacctcgaacatcagttgggatccctcctccagccaagatgatccttcttagagaaggctcagccttggaagcaaacttataaatcatattctcatggctttgttaaacttatttcaagtgatggtcattcatatcactatgaacttggatattcaagcctttggatggctatggagaggccttgaaatgtgtacaggtgtcaccatcatttctagtatattaggaaactgggatgggaggttgatttgctctctaaacttccctctagttggcaagtctcacatattcatcagcaggagtggagggtgggggaaaactagaaagatgaaaacttttacatttttctgatgggttcatgtctctgattgggtcagctggcttcctagcctaagctgggatctgaataccccttctctgtagctgctagtgagccttcccatttagattaaagattgctttatccagcagtcaattaactctccagttatcagtactcccacaattggccagggcaacaataattggagttcatactgatgccctgaggcactgaaaaaaaaaaaaatcccaaagtgccttctgagctgtctaaaagttacattgtgcttggtagatttagtgttaagtgtgcagtataattttctaatttattttctcaatcttttagcacatgtgtaagacactgtgcaaattttttgaaaatagagcaatactttttgtggaatactagctaactaattctgtcattaaactcatattttgaaaatattcagacaatgttgaaaatcct

SEQ ID NO: 56 - DNA, 2497 bp, Homo sapiens
atgcgtgcgtgcgtgcgtgcgtgtgtgtgtgtgtgtgcctctgctctttgtcctgagcccacgattccagagctggctggacccaaggaggtgaagagtcacttttcagccccaggaagggcaaagaagagagaaaatcagcctgtctgctctctccttggctcaacaaggcctctaacagtcttctgtcctctattctgcacacggcatatttgggaacgagaaacaaaagttttcccaaatgaagagaactcacttgtttattgtggggatttattttctgtcctcttgcagggcagaagaggggcttaatttccccacatatgatgggaaggaccgagtggtaagtctttccgagaagaacttcaagcaggttttaaagaaatatgacttgctttgcctctactaccatgagccggtgtcttcagataaggtcacgcaaaaacagttccaactgaaagaaatcgtgcttgagcttgtggcccaggtccttgaacataaagctataggctttgtgatggtggatgccaagaaagaagccaagcttgccaagaaactgggttttgatgaagaaggaagcctgtatattcttaagggtgatcgcacaatagagtttgatggcgagtttgcagctgatgtcttggtggagttcctcttggatgttgcaaagaaattatctttgaagatgaatgaggttgacttctatgagccatttatggatgagcccattgccatccccaacaaaccttacacagaagaggagctggtggagtttgtgaaggaacaccaaagacccactctacgtcgcctgcgcccagaagaaatgtttgaaacatgggaagatgatttgaatgggatccacattgtggcctttgcagagaagagtgatccagatggctacgaattcctggagatcctgaaacaggttgcccgggacaatactgacaaccccgatctgagcatcctgtggatcgacccggacgactttcctctgctcgttgcctactgggagaagactttcaagattgacctattcaggccacagattggggtggtgaatgtcacagatgctgacagtgtctggatggagattccagatgatgacgatcttccaactgctgaggagctggaggactggattgaggatgtgctttctggaaagataaacactgaagatgatgatgaagatgatgatgatgatgataattctgatgaagaggataatgatgacagtgatgacgatgatgatgaatagcccaactccaaacaattctgatgaaaacaaaatcacagcacccactaccatacagacagcacaaggtggcagcaagcaattctgccccacacccagccagctcctttcccttttccatcatctcttttcccactccctttgcgtcaggagcagcatcattcagcaaatgccttttcaaatgcagcaatcccacttagcagggacaggagaaaaattattcccatgttgactgtcttgactgtcacggaacagatcttgttctttgctggaccatcaagggtcatggcagtgcctgaacatggcagtctagggtgaacaatcccctaacacaagtttacttgtctttgattatgacagtaacaaaattgacagctttctaactcacaggcatagagtgaccttttaatcagagcccagggaagacacatgattaatgatttagctccctccatacctcgaacatcagttgggatccctcctccagccaagatgatccttcttagagaaggctcagccttggaagcaaacttataaatcatattctcatggctttgttaaacttatttcaagtgatggtcattcatatcactatgaacttggatattcaagcctttggatggctatggagaggccttgaaatgtgtacaggtgtcaccatcatttctagtatattaggaaactgggatgggaggttgatttgctctctaaacttccctctagttggcaagtctcacatattcatcagcaggagtggagggtgggggaaaactagaaagatgaaaacttttacatttttctgatgggttcatgtctctgattgggtcagctggcttcctagcctaagctgggatctgaataccccttctctgtagctgctagtgagccttcccatttagattaaagattgctttatccagcagtcaattaactctccagttatcagtactcccacaattggccagggcaacaataattggagttcatactgatgccctgaggcactgaaaaaaaaaaaaatcccaaagtgccttctgagctgtctaaaagttacattgtgcttggtagatttagtgttaagtgtgcagtataattttctaatttattttctcaatcttttagcacatgtgtaagacactgtgcaaattttttgaaaatagagcaatactttttgtggaatactagctaactaattctgtcattaaactcatattttgaaaatattcagacaatgttgaaaatcct

SEQ ID NO: 57 - DNA, 2209 bp, Homo sapiens
taatgagacagaggctgagcagagctatgtaagggcagaagaggggcttaatttccccacatatgatgggaaggaccgagtggtaagtctttccgagaagaacttcaagcaggttttaaagaaatatgacttgctttgcctctactaccatgagccggtgtcttcagataaggtcacgcaaaaacagttccaactgaaagaaatcgtgcttgagcttgtggcccaggtccttgaacataaagctataggctttgtgatggtggatgccaagaaagaagccaagcttgccaagaaactggactacaaggcttttgaagaagcagctgaacacttccagccttacatcaaattctttgccacctttgacaaaggggttgcaaagaaattatctttgaagatgaatgaggttgacttctatgagccatttatggatgagcccattgccatccccaacaaaccttacacagaagaggagctggtggagtttgtgaaggaacaccaaagacccactctacgtcgcctgcgcccagaagaaatgtttgaaacatgggaagatgatttgaatgggatccacattgtggcctttgcagagaagagtgatccagatggctacgaattcctggagatcctgaaacaggttgcccgggacaatactgacaaccccgatctgagcatcctgtggatcgacccggacgactttcctctgctcgttgcctactgggagaagactttcaagattgacctattcaggccacagattggggtggtgaatgtcacagatgctgacagtgtctggatggagattccagatgatgacgatcttccaactgctgaggagctggaggactggattgaggatgtgctttctggaaagataaacactgaagatgatgatgaagatgatgatgatgatgataattctgatgaagaggataatgatgacagtgatgacgatgatgatgaatagcccaactccaaacaattctgatgaaaacaaaatcacagcacccactaccatacagacagcacaaggtggcagcaagcaattctgccccacacccagccagctcctttcccttttccatcatctcttttcccactccctttgcgtcaggagcagcatcattcagcaaatgccttttcaaatgcagcaatcccacttagcagggacaggagaaaaattattcccatgttgactgtcttgactgtcacggaacagatcttgttctttgctggaccatcaagggtcatggcagtgcctgaacatggcagtctagggtgaacaatcccctaacacaagtttacttgtctttgattatgacagtaacaaaattgacagctttctaactcacaggcatagagtgaccttttaatcagagcccagggaagacacatgattaatgatttagctccctccatacctcgaacatcagttgggatccctcctccagccaagatgatccttcttagagaaggctcagccttggaagcaaacttataaatcatattctcatggctttgttaaacttatttcaagtgatggtcattcatatcactatgaacttggatattcaagcctttggatggctatggagaggccttgaaatgtgtacaggtgtcaccatcatttctagtatattaggaaactgggatgggaggttgatttgctctctaaacttccctctagttggcaagtctcacatattcatcagcaggagtggagggtgggggaaaactagaaagatgaaaacttttacatttttctgatgggttcatgtctctgattgggtcagctggcttcctagcctaagctgggatctgaataccccttctctgtagctgctagtgagccttcccatttagattaaagattgctttatccagcagtcaattaactctccagttatcagtactcccacaattggccagggcaacaataattggagttcatactgatgccctgaggcactgaaaaaaaaaaaaatcccaaagtgccttctgagctgtctaaaagttacattgtgcttggtagatttagtgttaagtgtgcagtataattttctaatttattttctcaatcttttagcacatgtgtaagacactgtgcaaattttttgaaaatagagcaatactttttgtggaatactagctaactaattctgtcattaaactcatattttgaaaatattcagacaatgttgaaaatcct

SEQ ID NO: 58 - DNA, 1951 bp, Homo sapiens
tgcaggcaaacagcaaccattctgccttgacaacacactgaacatgtggctgctttaatccagagagaaaatgtcttcctggctatcggctggctctccgagctctttatctgttgttgcaaagaaattatctttgaagatgaatgaggttgacttctatgagccatttatggatgagcccattgccatccccaacaaaccttacacagaagaggagctggtggagtttgtgaaggaacaccaaagacccactctacgtcgcctgcgcccagaagaaatgtttgaaacatgggaagatgatttgaatgggatccacattgtggcctttgcagagaagagtgatccagatggctacgaattcctggagatcctgaaacaggttgcccgggacaatactgacaaccccgatctgagcatcctgtggatcgacccggacgactttcctctgctcgttgcctactgggagaagactttcaagattgacctattcaggccacagattggggtggtgaatgtcacagatgctgacagtgtctggatggagattccagatgatgacgatcttccaactgctgaggagctggaggactggattgaggatgtgctttctggaaagataaacactgaagatgatgatgaagatgatgatgatgatgataattctgatgaagaggataatgatgacagtgatgacgatgatgatgaatagcccaactccaaacaattctgatgaaaacaaaatcacagcacccactaccatacagacagcacaaggtggcagcaagcaattctgccccacacccagccagctcctttcccttttccatcatctcttttcccactccctttgcgtcaggagcagcatcattcagcaaatgccttttcaaatgcagcaatcccacttagcagggacaggagaaaaattattcccatgttgactgtcttgactgtcacggaacagatcttgttctttgctggaccatcaagggtcatggcagtgcctgaacatggcagtctagggtgaacaatcccctaacacaagtttacttgtctttgattatgacagtaacaaaattgacagctttctaactcacaggcatagagtgaccttttaatcagagcccagggaagacacatgattaatgatttagctccctccatacctcgaacatcagttgggatccctcctccagccaagatgatccttcttagagaaggctcagccttggaagcaaacttataaatcatattctcatggctttgttaaacttatttcaagtgatggtcattcatatcactatgaacttggatattcaagcctttggatggctatggagaggccttgaaatgtgtacaggtgtcaccatcatttctagtatattaggaaactgggatgggaggttgatttgctctctaaacttccctctagttggcaagtctcacatattcatcagcaggagtggagggtgggggaaaactagaaagatgaaaacttttacatttttctgatgggttcatgtctctgattgggtcagctggcttcctagcctaagctgggatctgaataccccttctctgtagctgctagtgagccttcccatttagattaaagattgctttatccagcagtcaattaactctccagttatcagtactcccacaattggccagggcaacaataattggagttcatactgatgccctgaggcactgaaaaaaaaaaaaatcccaaagtgccttctgagctgtctaaaagttacattgtgcttggtagatttagtgttaagtgtgcagtataattttctaatttattttctcaatcttttagcacatgtgtaagacactgtgcaaattttttgaaaatagagcaatactttttgtggaatactagctaactaattctgtcattaaactcatattttgaaaatattcagacaatgttgaaaatcct

SEQ ID NO: 59 - DNA, 1740 bp, Homo sapiens
tctatagaataatcctataattgagggtgagcaccaaatgtcctaagaagtcctcgtggaaaaatcacactctgctctccacattagaagctgtgtatgtgcaggggttactcaactctcttgaatcctgtttcagatggctacgaattcctggagatcctgaaacaggttgcccgggacaatactgacaaccccgatctgagcatcctgtggatcgacccggacgactttcctctgctcgttgcctactgggagaagactttcaagattgacctattcaggccacagattggggtggtgaatgtcacagatgctgacagtgtctggatggagattccagatgatgacgatcttccaactgctgaggagctggaggactggattgaggatgtgctttctggaaagataaacactgaagatgatgatgaagatgatgatgatgatgataattctgatgaagaggataatgatgacagtgatgacgatgatgatgaatagcccaactccaaacaattctgatgaaaacaaaatcacagcacccactaccatacagacagcacaaggtggcagcaagcaattctgccccacacccagccagctcctttcccttttccatcatctcttttcccactccctttgcgtcaggagcagcatcattcagcaaatgccttttcaaatgcagcaatcccacttagcagggacaggagaaaaattattcccatgttgactgtcttgactgtcacggaacagatcttgttctttgctggaccatcaagggtcatggcagtgcctgaacatggcagtctagggtgaacaatcccctaacacaagtttacttgtctttgattatgacagtaacaaaattgacagctttctaactcacaggcatagagtgaccttttaatcagagcccagggaagacacatgattaatgatttagctccctccatacctcgaacatcagttgggatccctcctccagccaagatgatccttcttagagaaggctcagccttggaagcaaacttataaatcatattctcatggctttgttaaacttatttcaagtgatggtcattcatatcactatgaacttggatattcaagcctttggatggctatggagaggccttgaaatgtgtacaggtgtcaccatcatttctagtatattaggaaactgggatgggaggttgatttgctctctaaacttccctctagttggcaagtctcacatattcatcagcaggagtggagggtgggggaaaactagaaagatgaaaacttttacatttttctgatgggttcatgtctctgattgggtcagctggcttcctagcctaagctgggatctgaataccccttctctgtagctgctagtgagccttcccatttagattaaagattgctttatccagcagtcaattaactctccagttatcagtactcccacaattggccagggcaacaataattggagttcatactgatgccctgaggcactgaaaaaaaaaaaaatcccaaagtgccttctgagctgtctaaaagttacattgtgcttggtagatttagtgttaagtgtgcagtataattttctaatttattttctcaatcttttagcacatgtgtaagacactgtgcaaattttttgaaaatagagcaatactttttgtggaatactagctaactaattctgtcattaaactcatattttgaaaatattcagacaatgttgaaaatcct

SEQ ID NO: 60 - DNA, 1259 bp, Homo sapiens
atgcgtgcgtgcgtgcgtgcgtgtgtgtgtgtgtgtgcctctgctctttgtcctgagcccacgattccagagctggctggacccaaggaggtgaagagtcacttttcagccccaggaagggcaaagaagagagaaaatcagcctgtctgctctctccttggctcaacaaggcctctaacagtcttctgtcctctattctgcacacggcatatttgggaacgagaaacaaaagttttcccaaatgaagagaactcacttgtttattgtggggatttattttctgtcctcttgcagggcagaagaggggcttaatttccccacatatgatgggaaggaccgagtggtaagtctttccgagaagaacttcaagcaggttttaaagaaatatgacttgctttgcctctactaccatgagccggtgtcttcagataaggtcacgcaaaaacagttccaactgaaagaaatcgtgcttgagcttgtggcccaggtccttgaacataaagctataggctttgtgatggtggatgccaagaaagaagccaagcttgccaagaaactgggttttgatgaagaaggaagcctgtatattcttaagggtgatcgcacaatagagtttgatggcgagtttgcagctgatgtcttggtggagttcctcttggatctaattgaagacccagtggagatcatcagcagcaaactggaagtccaagccttcgaacgcattgaagactacatcaaactcattggctttttcaagagtgaggactcagaatactacaaggcttttgaagaagcagctgaacacttccagccttacatcaaattctttgccacctttgacaaaggggttgcaaagaaattatctttgaagatgaatgaggttgacttctatgagccatttatggatgagcccattgccatccccaacaaaccttacacagaagaggagctggtggagtttgtgaaggaacaccaaagatcaaggaattggactcaatagttaagtaacttagccaaggatgaacactctatgcatagaacttctgggagagaaatgcttgataccacttagtgtagctccagcatggatcagcaaactttttctgtaaagaacaaaatggtaaatatttcaggttctgtgggccagatggcgtctgtagcaactacttgactgcggctgtggcatgaaagcagccatggatcatgtataaacaaatgggtgtggctgtgtaccagtaaaagtttatccggaaaaaaag

SEQ ID NO: 61 - DNA, 237 bp, Artificial sequence
  Synthetic oligonucleotide
atgcgtgcgtgcgtgcgtgcgtgtgtgtgtgtgtgtgcctctgctctttgtcctgagcccacgattccagagctggctggacccaaggaggtgaagagtcacttttcagccccaggaagggcaaagaagagagaaaatcagcctgtctgctctctccttggctcaacaaggcctctaacagtcttctgtcctctattctgcacacggcatatttgggaacgagaaacaaaagttttc

SEQ ID NO: 62 - DNA, 181 bp, Artificial sequence
  Synthetic oligonucleotide
ggcagaagaggggcttaatttccccacatatgatgggaaggaccgagtggtaagtctttccgagaagaacttcaagcaggttttaaagaaatatgacttgctttgcctctactaccatgagccggtgtcttcagataaggtcacgcaaaaacagttccaactgaaagaaatcgtgcttgag

SEQ ID NO: 63 - DNA, 141 bp, Artificial sequence
  Synthetic oligonucleotide
cactggcaaatatcccagtggtggttgcatttccaaaccccaagagaggaaggcaaaatgaagttgctggagttgagtgaatctgcagatggagctgcgtggaaacgctggggagggaatagcaacacacacaggattcag

SEQ ID NO: 64 - DNA, 131 bp, Artificial sequence
  Synthetic oligonucleotide
gttgcaaagaaattatctttgaagatgaatgaggttgacttctatgagccatttatggatgagcccattgccatccccaacaaaccttacacagaagaggagctggtggagtttgtgaaggaacaccaaag

SEQ ID NO: 65 - DNA, 281 bp, Artificial sequence
  Synthetic oligonucleotide
atcaaggaattggactcaatagttaagtaacttagccaaggatgaacactctatgcatagaacttctgggagagaaatgcttgataccacttagtgtagctccagcatggatcagcaaactttttctgtaaagaacaaaatggtaaatatttcaggttctgtgggccagatggcgtctgtagcaactacttgactgcggctgtggcatgaaagcagccatggatcatgtataaacaaatgggtgtggctgtgtaccagtaaaagtttatccggaaaaaaag

SEQ ID NO: 66 - DNA, 136 bp, Artificial sequence
  Synthetic oligonucleotide
tctatagaataatcctataattgagggtgagcaccaaatgtcctaagaagtcctcgtggaaaaatcacactctgctctccacattagaagctgtgtatgtgcaggggttactcaactctcttgaatcctgtttcag

SEQ ID NO: 67 - DNA, 248 bp, Artificial sequence
  Synthetic oligonucleotide
ctgctgaggagctggaggactggattgaggatgtgctttctggaaagataaacactgaagatgatgatgaagatgatgatgatgatgataattctgatgaagaggataatgatgacagtgatgacgatgatgatgaatagcccaactccaaacaattctgatgaaaacaaaatcacagcacccactaccatacagacagcacaaggtggcagcaagcaattctgccccacacccagccagctcctttc

SEQ ID NO: 68 - DNA, 1124 bp, Artificial sequence
  Synthetic oligonucleotide
catctcttttcccactccctttgcgtcaggagcagcatcattcagcaaatgccttttcaaatgcagcaatcccacttagcagggacaggagaaaaattattcccatgttgactgtcttgactgtcacggaacagatcttgttctttgctggaccatcaagggtcatggcagtgcctgaacatggcagtctagggtgaacaatcccctaacacaagtttacttgtctttgattatgacagtaacaaaattgacagctttctaactcacaggcatagagtgaccttttaatcagagcccagggaagacacatgattaatgatttagctccctccatacctcgaacatcagttgggatccctcctccagccaagatgatccttcttagagaaggctcagccttggaagcaaacttataaatcatattctcatggctttgttaaacttatttcaagtgatggtcattcatatcactatgaacttggatattcaagcctttggatggctatggagaggccttgaaatgtgtacaggtgtcaccatcatttctagtatattaggaaactgggatgggaggttgatttgctctctaaacttccctctagttggcaagtctcacatattcatcagcaggagtggagggtgggggaaaactagaaagatgaaaacttttacatttttctgatgggttcatgtctctgattgggtcagctggcttcctagcctaagctgggatctgaataccccttctctgtagctgctagtgagccttcccatttagattaaagattgctttatccagcagtcaattaactctccagttatcagtactcccacaattggccagggcaacaataattggagttcatactgatgccctgaggcactgaaaaaaaaaaaaatcccaaagtgccttctgagctgtctaaaagttacattgtgcttggtagatttagtgttaagtgtgcagtataattttctaatttattttctcaatcttttagcacatgtgtaagacactgtgcaaattttttgaaaatagagcaatactttttgtggaatactagctaactaattctgtcattaaactcatattttgaaaatattcagacaatgttgaaaatcct

SEQ ID NO: 69 - DNA, 33 bp, Artificial sequence
  Synthetic oligonucleotide
taatgagacagaggctgagcagagctatgtaag

SEQ ID NO: 70 - DNA, 57 bp, Artificial sequence
  Synthetic oligonucleotide
ccaaatgaagagaactcacttgtttattgtggggatttattttctgtcctcttgcag

SEQ ID NO: 71 - DNA, 85 bp, Artificial sequence
  Synthetic oligonucleotide
cttgtggcccaggtccttgaacataaagctataggctttgtgatggtggatgccaagaaagaagccaagcttgccaagaaactgg

SEQ ID NO: 72 - DNA, 101 bp, Artificial sequence
  Synthetic oligonucleotide
gttttgatgaagaaggaagcctgtatattcttaagggtgatcgcacaatagagtttgatggcgagtttgcagctgatgtcttggtggagttcctcttggat

SEQ ID NO: 73 - DNA, 112 bp, Artificial sequence
  Synthetic oligonucleotide
ctaattgaagacccagtggagatcatcagcagcaaactggaagtccaagccttcgaacgcattgaagactacatcaaactcattggctttttcaagagtgaggactcagaat

SEQ ID NO: 74 - DNA, 74 bp, Artificial sequence
  Synthetic oligonucleotide
actacaaggcttttgaagaagcagctgaacacttccagccttacatcaaattctttgccacctttgacaaaggg

SEQ ID NO: 75 - DNA, 95 bp, Artificial sequence
  Synthetic oligonucleotide
gtgctgtggctcacacctgtaatcccaacactttgggaggctgacgggggtggattgcatgagccttggagttggagaccagcctgggcaacatg

SEQ ID NO: 76 - DNA, 115 bp, Artificial sequence
  Synthetic oligonucleotide
tgcaggcaaacagcaaccattctgccttgacaacacactgaacatgtggctgctttaatccagagagaaaatgtcttcctggctatcggctggctctccgagctctttatctgtt

SEQ ID NO: 77 - DNA, 46 bp, Artificial sequence
  Synthetic oligonucleotide
acccactctacgtcgcctgcgcccagaagaaatgtttgaaacatgg

SEQ ID NO: 78 - DNA, 55 bp, Artificial sequence
  Synthetic oligonucleotide
gaagatgatttgaatgggatccacattgtggcctttgcagagaagagtgatccag

SEQ ID NO: 79 - DNA, 101 bp, Artificial sequence
  Synthetic oligonucleotide
atggctacgaattcctggagatcctgaaacaggttgcccgggacaatactgacaaccccgatctgagcatcctgtggatcgacccggacgactttcctctg

SEQ ID NO: 80 - DNA, 75 bp, Artificial sequence
  Synthetic oligonucleotide
ctcgttgcctactgggagaagactttcaagattgacctattcaggccacagattggggtggtgaatgtcacagat

SEQ ID NO: 81 - DNA, 46 bp, Artificial sequence
  Synthetic oligonucleotide
gctgacagtgtctggatggagattccagatgatgacgatcttccaa

SEQ ID NO: 82 - DNA, 10 bp, Artificial sequence
  Synthetic oligonucleotide
ccttttccat

SEQ ID NO: 83 - protein, 399 aa, Homo sapiens
MKRTHLFIVGIYFLSSCRAEEGLNFPTYDGKDRVVSLSEKNFKQVLKKYDLLCLYYHEPVSSDKVTQKQFQLKEIVLELVAQVLEHKAIGFVMVDAKKEAKLAKKLGFDEEGSLYILKGDRTIEFDGEFAADVLVEFLLDLIEDPVEIISSKLEVQAFERIEDYIKLIGFFKSEDSEYYKAFEEAAEHFQPYIKFFATFDKGVAKKLSLKMNEVDFYEPFMDEPIAIPNKPYTEEELVEFVKEHQRPTLRRLRPEEMFETWEDDLNGIHIVAFAEKSDPDGYEFLEILKQVARDNTDNPDLSILWIDPDDFPLLVAYWEKTFKIDLFRPQIGVVNVTDADSVWMEIPDDDDLPTAEELEDWIEDVLSGKINTEDDDEDDDDDDNSDEEDNDDSDDDDDE

SEQ ID NO: 84 - protein, 240 aa, Homo sapiens
MKRTHLFIVGIYFLSSCRAEEGLNFPTYDGKDRVVSLSEKNFKQVLKKYDLLCLYYHEPVSSDKVTQKQFQLKEIVLELVAQVLEHKAIGFVMVDAKKEAKLAKKLGFDEEGSLYILKGDRTIEFDGEFAADVLVEFLLDLIEDPVEIISSKLEVQAFERIEDYIKLIGFFKSEDSEYYKAFEEAAEHFQPYIKFFATFDKGVLWLTPVIPTLWEADGGGLHEPWSWRPAWATWLQRNYL

SEQ ID NO: 85 - protein, 446 aa, Homo sapiens
MKRTHLFIVGIYFLSSCRAEEGLNFPTYDGKDRVVSLSEKNFKQVLKKYDLLCLYYHEPVSSDKVTQKQFQLKEIVLEHWQISQWWLHFQTPREEGKMKLLELSESADGAAWKRWGGNSNTHRIQLVAQVLEHKAIGFVMVDAKKEAKLAKKLGFDEEGSLYILKGDRTIEFDGEFAADVLVEFLLDLIEDPVEIISSKLEVQAFERIEDYIKLIGFFKSEDSEYYKAFEEAAEHFQPYIKFFATFDKGVAKKLSLKMNEVDFYEPFMDEPIAIPNKPYTEEELVEFVKEHQRPTLRRLRPEEMFETWEDDLNGIHIVAFAEKSDPDGYEFLEILKQVARDNTDNPDLSILWIDPDDFPLLVAYWEKTFKIDLFRPQIGVVNVTDADSVWMEIPDDDDLPTAEELEDWIEDVLSGKINTEDDDEDDDDDDNSDEEDNDDSDDDDDE

SEQ ID NO: 86 - protein, 337 aa, Homo sapiens
MKRTHLFIVGIYFLSSCRAEEGLNFPTYDGKDRVVSLSEKNFKQVLKKYDLLCLYYHEPVSSDKVTQKQFQLKEIVLELVAQVLEHKAIGFVMVDAKKEAKLAKKLGFDEEGSLYILKGDRTIEFDGEFAADVLVEFLLDVAKKLSLKMNEVDFYEPFMDEPIAIPNKPYTEEELVEFVKEHQRPTLRRLRPEEMFETWEDDLNGIHIVAFAEKSDPDGYEFLEILKQVARDNTDNPDLSILWIDPDDFPLLVAYWEKTFKIDLFRPQIGVVNVTDADSVWMEIPDDDDLPTAEELEDWIEDVLSGKINTEDDDEDDDDDDNSDEEDNDDSDDDDDE

SEQ ID NO: 87 - protein, 321 aa, Homo sapiens
NETEAEQSYVRAEEGLNFPTYDGKDRVVSLSEKNFKQVLKKYDLLCLYYHEPVSSDKVTQKQFQLKEIVLELVAQVLEHKAIGFVMVDAKKEAKLAKKLDYKAFEEAAEHFQPYIKFFATFDKGVAKKLSLKMNEVDFYEPFMDEPIAIPNKPYTEEELVEFVKEHQRPTLRRLRPEEMFETWEDDLNGIHIVAFAEKSDPDGYEFLEILKQVARDNTDNPDLSILWIDPDDFPLLVAYWEKTFKIDLFRPQIGVVNVTDADSVWMEIPDDDDLPTAEELEDWIEDVLSGKINTEDDDEDDDDDDNSDEEDNDDSDDDDDE

SEQ ID NO: 88 - protein, 212 aa, Homo sapiens
MSSWLSAGSPSSLSVVAKKLSLKMNEVDFYEPFMDEPIAIPNKPYTEEELVEFVKEHQRPTLRRLRPEEMFETWEDDLNGIHIVAFAEKSDPDGYEFLEILKQVARDNTDNPDLSILWIDPDDFPLLVAYWEKTFKIDLFRPQIGVVNVTDADSVWMEIPDDDDLPTAEELEDWIEDVLSGKINTEDDDEDDDDDDNSDEEDNDDSDDDDDE

SEQ ID NO: 89 - protein, 133 aa, Homo sapiens
MCRGYSTLLNPVSDGYEFLEILKQVARDNTDNPDLSILWIDPDDFPLLVAYWEKTFKIDLFRPQIGVVNVTDADSVWMEIPDDDDLPTAEELEDWIEDVLSGKINTEDDDEDDDDDDNSDEEDNDDSDDDDDE

SEQ ID NO: 90 - protein, 252 aa, Homo sapiens
MKRTHLFIVGIYFLSSCRAEEGLNFPTYDGKDRVVSLSEKNFKQVLKKYDLLCLYYHEPVSSDKVTQKQFQLKEIVLELVAQVLEHKAIGFVMVDAKKEAKLAKKLGFDEEGSLYILKGDRTIEFDGEFAADVLVEFLLDLIEDPVEIISSKLEVQAFERIEDYIKLIGFFKSEDSEYYKAFEEAAEHFQPYIKFFATFDKGVAKKLSLKMNEVDFYEPFMDEPIAIPNKPYTEEELVEFVKEHQRSRNWTQ

SEQ ID NO: 91 - DNA, 23 bp, Artificial sequence
  Synthetic oligonucleotide
ctggattgaggatgtgctttctg

SEQ ID NO: 92 - DNA, 23 bp, Artificial sequence
  Synthetic oligonucleotide
tttggagttgggctattcatcat

SEQ ID NO: 93 - DNA, 133 bp, Artificial sequence
  Synthetic oligonucleotide
ctggattgaggatgtgctttctggaaagataaacactgaagatgatgatgaagatgatgatgatgatgataattctgatgaagaggataatgatgacagtgatgacgatgatgatgaatagcccaactccaaa

SEQ ID NO: 94 - DNA, 26 bp, Homo sapiens
ttgataccacttagtgtagctccagc

SEQ ID NO: 95 - DNA, 23 bp, Homo sapiens
tcaagtagttgctacagacgcca

SEQ ID NO: 96 - DNA, 113 bp, Homo sapiens
ttgataccacttagtgtagctccagcatggatcagcaaactttttctgtaaagaacaaaatggtaaatatttcaggttctgtgggccagatggcgtctgtagcaactacttga

SEQ ID NO: 97 - DNA, 22 bp, Homo sapiens
atatcccagtggtggttgcatt

SEQ ID NO: 98 - DNA, 17 bp, Homo sapiens
ccctccccagcgtttcc

SEQ ID NO: 99 - DNA, 108 bp, Homo sapiens
atatcccagtggtggttgcatttccaaaccccaagagaggaaggcaaaatgaagttgctggagttgagtgaatctgcagatggagctgcgtggaaacgctggggaggg

SEQ ID NO: 100 - DNA, 2110 bp, Homo sapiens
tctgcaggaggggagctgggaacgacctgagctaaagctcggagctgtgcgaagaaaccggaaaagcccagagcacttgcaggggcgggtggggagctagatggtggggtggggtggggacggaggagggccagcaggagacattccgcagggaggggcaagcacgtgtgaggcgggcggggcgcgaagggtcaggcttttgctcaaaacaggcagaggacaaggtcagctcagccgcagaccgagccgctggtgactgtctccgccaccaggcagtgagagtgaagggagagcgcgagctctgaagcccgctagactaagcttgcaatctgagctccattcaccccctcctatttcttgagaccttgtcagttcccctgtgagcctcggactcctcacttgtaaaacgaggacagatgcccgtgccagaagtcaaccagagctttccccggcgtgggcaccagcccaagggcgttttgcttttctagtctcatctctgctctgacgctaagctcaaagagggactgggggacgggaagatatccaccatggcatgcgccctagctctcgggctggtgttggctgcttccttctcagattccagagtgcctagaggccaggaaagggagaaggtcctaccagcctggggtagggactcgggggccaggcactggcgctgacgcaggctagcagggcgccactggctggtccccacccacctcggtgggttgggggatgggcgcaccagcccctcctgggtgagccctagcctggggcttcctatttcgggagccgggggcgtgggccacgtctcctcatgtgatgcgagggctatttaaagcggcagcccgggcagggagccgccgtcggagcccttgcacgcctgctctcttgtagcttctctcagcctagcccagcatcactatggtggacgctttcctgggcacctggaagctagtggacagcaagaatttcgatgactacatgaagtcactcggtgtgggttttgctaccaggcaggtggccagcatgaccaagcctaccacaatcatcgaaaagaatggggacattctcaccctaaaaacacacagcaccttcaagaacacagagatcagctttaagttgggggtggagttcgatgagacaacagcagatgacaggaaggtcaagtccattgtgacactggatggagggaaacttgttcacctgcagaaatgggacgggcaagagaccacacttgtgcgggagctaattgatggaaaactcatcctggtaagatgggcaactttggagctatatctgattggttattactactgctctttcagccaagcctgttctaaaaagccaagtcctcccctgagagctgtagaagctgggacaagagagtggttgtgggtcagggtggtatcaggtgggaattttctgtgtagtggctttggactcacacaggccggaactcaaatcttaccttataggctacatgactgtgggcaaatcaccttttccaagtgcaactgtaaaacgggtattaataataccaaccttgtagggctgctgggaagcctgtaagagacagtgtatgcacagcacaaagcatcactgattgaggaacacagcaggtgctccatgtcctttgtttgctcttcctgtgtttctaccttgcctcacctcaggaagaagtagaaaacagggccaaatctgatcccaggccctctaggaggggctcccattgcctatctcagcattccctttcctctcctccctaggactgcattgtcacttgcagggacaggctcgtgactggtggggacactgaatgacagtacagtcctttcttccccattctagtcctaccccattttcatgctttctatgtctggcctactgaaactacttgactactgcttgggtaggaagtaccacagccaggctggcagatctgttcaagcttggggacttcacttggagaatctagccttgactgaattccccccagacccagggagagcagccaactgtggattctgcctaaccacagggcctcaggttttcacctaggcatcttcactgcacaccttcttgggtcagcataacctgttaactgcat

SEQ ID NO: 101 - DNA, 1733 bp, Homo sapiens
tctgcaggaggggagctgggaacgacctgagctaaagctcggagctgtgcgaagaaaccggaaaagcccagagcacttgcaggggcgggtggggagctagatggtggggtggggtggggacggaggagggccagcaggagacattccgcagggaggggcaagcacgtgtgaggcgggcggggcgcgaagggtcaggcttttgctcaaaacaggcagaggacaaggtcagctcagccgcagaccgagccgctggtgactgtctccgccaccaggcagtgagagtgaagggagagcgcgagctctgaagcccgctagactaagcttgcaatctgagctccattcaccccctcctatttcttgagaccttgtcagttcccctgtgagcctcggactcctcacttgtaaaacgaggacagatgcccgtgccagaagtcaaccagagctttccccggcgtgggcaccagcccaagggcgttttgcttttctagtctcatctctgctctgacgctaagctcaaagagggactgggggacgggaagatatccaccatggcatgcgccctagctctcgggctggtgttggctgcttccttctcagattccagagtgcctagaggccaggaaagggagaaggtcctaccagcctggggtagggactcgggggccaggcactggcgctgacgcaggctagcagggcgccactggctggtccccacccacctcggtgggttgggggatgggcgcaccagcccctcctgggtgagccctagcctggggcttcctatttcgggagccgggggcgtgggccacgtctcctcatgtgatgcgagggctatttaaagcggcagcccgggcagggagccgccgtcggagcccttgcacgcctgctctcttgtagcttctctcagcctagcccagcatcactatggtggacgctttcctgggcacctggaagctagtggacagcaagaatttcgatgactacatgaagtcactcggtgtgggttttgctaccaggcaggtggccagcatgaccaagcctaccacaatcatcgaaaagaatggggacattctcaccctaaaaacacacagcaccttcaagaacacagagatcagctttaagttgggggtggagttcgatgagacaacagcagatgacaggaaggtcaagtccattgtgacactggatggagggaaacttgttcacctgcagaaatgggacgggcaagagaccacacttgtgcgggagctaattgatggaaaactcatcctggatgttctgacagcctggccaagcatctacaggagacaagtcaaagttttaagagaagatgaaataacaattcttccttggcatctccaatggagtagagagaaggcaacaaagcttctcagacccacattaccgagctataacaaccatggctgggaggagctgagagttggcaaatcaatagtttagctatgttgctgaaccttcctggatggcaagaccatggaagtccatcacaagatattatggggtcaggagcctcactgggttctgccccttatataggtgaatatcctgggaaagtaaaaatgaaaatacagagtctggcaccagttccctgcaagcctggtccagcctggataaagaagtgaggagagtaataatactgccttacacctaaacagtgctttagtttatcaagctttttgcatccttatcttacaataatagtctgtagagtc

SEQ ID NO: 102 - DNA, 1822 bp, Homo sapiens
tctgcaggaggggagctgggaacgacctgagctaaagctcggagctgtgcgaagaaaccggaaaagcccagagcacttgcaggggcgggtggggagctagatggtggggtggggtggggacggaggagggccagcaggagacattccgcagggaggggcaagcacgtgtgaggcgggcggggcgcgaagggtcaggcttttgctcaaaacaggcagaggacaaggtcagctcagccgcagaccgagccgctggtgactgtctccgccaccaggcagtgagagtgaagggagagcgcgagctctgaagcccgctagactaagcttgcaatctgagctccattcaccccctcctatttcttgagaccttgtcagttcccctgtgagcctcggactcctcacttgtaaaacgaggacagatgcccgtgccagaagtcaaccagagctttccccggcgtgggcaccagcccaagggcgttttgcttttctagtctcatctctgctctgacgctaagctcaaagagggactgggggacgggaagatatccaccatggcatgcgccctagctctcgggctggtgttggctgcttccttctcagattccagagtgcctagaggccaggaaagggagaaggtcctaccagcctggggtagggactcgggggccaggcactggcgctgacgcaggctagcagggcgccactggctggtccccacccacctcggtgggttgggggatgggcgcaccagcccctcctgggtgagccctagcctggggcttcctatttcgggagccgggggcgtgggccacgtctcctcatgtgatgcgagggctatttaaagcggcagcccgggcagggagccgccgtcggagcccttgcacgcctgctctcttgtagcttctctcagcctagcccagcatcactatggtggacgctttcctgggcacctggaagctagtggacagcaagaatttcgatgactacatgaagtcactcggtgtgggttttgctaccaggcaggtggccagcatgaccaagcctaccacaatcatcgaaaagaatggggacattctcaccctaaaaacacacagcaccttcaagaacacagagatcagctttaagttgggggtggagttcgatgagacaacagcagatgacaggaaggtcaagtccattgtgacactggatggagggaaacttgttcacctgcagaaatgggacgggcaagagaccacacttgtgcgggagctaattgatggaaaactcatcctgatggaaaaactgcaactcagaaatgtaaagtgagtcgaccaaggctaaagcggcaaaaccactatactttataacacagagtttggcactatttccactttgttctctctcaaagatgaaggctcaggaggagggaagataaaaacaaatcactggagagtcctggcatgctggaacatggactctagctagcaagaagggctcaaggaggtggccttctcctagacctcaactttgatgcaaaagctgttttgcagcctgaacaaagacaatccaatcctccagcaaatggcgtcattttccctacgtgtctagccttgagctacagaacaaaagaacaatcacatccgaagttgtagttcgcctggttgcggtggctcacgcctgtgatcccagcactttgggaggccaaggtgggtggatcacctgaggtcaggaggtcgagactagcctgaccaacatgaagaaaccccatctctactaaaaatacaaaattagctgggcgtggtggcacatgcctgtaatcccagctactcgggaggctgaggca

SEQ ID NO: 103 - DNA, 3531 bp, Homo sapiens
tctgcaggaggggagctgggaacgacctgagctaaagctcggagctgtgcgaagaaaccggaaaagcccagagcacttgcaggggcgggtggggagctagatggtggggtggggtggggacggaggagggccagcaggagacattccgcagggaggggcaagcacgtgtgaggcgggcggggcgcgaagggtcaggcttttgctcaaaacaggcagaggacaaggtcagctcagccgcagaccgagccgctggtgactgtctccgccaccaggcagtgagagtgaagggagagcgcgagctctgaagcccgctagactaagcttgcaatctgagctccattcaccccctcctatttcttgagaccttgtcagttcccctgtgagcctcggactcctcacttgtaaaacgaggacagatgcccgtgccagaagtcaaccagagctttccccggcgtgggcaccagcccaagggcgttttgcttttctagtctcatctctgctctgacgctaagctcaaagagggactgggggacgggaagatatccaccatggcatgcgccctagctctcgggctggtgttggctgcttccttctcagattccagagtgcctagaggccaggaaagggagaaggtcctaccagcctggggtagggactcgggggccaggcactggcgctgacgcaggctagcagggcgccactggctggtccccacccacctcggtgggttgggggatgggcgcaccagcccctcctgggtgagccctagcctggggcttcctatttcgggagccgggggcgtgggccacgtctcctcatgtgatgcgagggctatttaaagcggcagcccgggcagggagccgccgtcggagcccttgcacgcctgctctcttgtagcttctctcagcctagcccagcatcactatggtggacgctttcctgggcacctggaagctagtggacagcaagaatttcgatgactacatgaagtcactcgctcatatactcataaccttccccctaccctcaggtgtgggttttgctaccaggcaggtggccagcatgaccaagcctaccacaatcatcgaaaagaatggggacattctcaccctaaaaacacacagcaccttcaagaacacagagatcagctttaagttgggggtggagttcgatgagacaacagcagatgacaggaaggtcaagtccattgtgacactggatggagggaaacttgttcacctgcagaaatgggacgggcaagagaccacacttgtgcgggagctaattgatggaaaactcatcctgacactcacccacggcactgcagtttgcactcgcacttatgagaaagaggcatgacctgactgcactgttgctgactactactctgccaatcggctacccctcgactcagcaccacattgcctcatttcttcctctgcattttgtacaaatccacgaattcttctggggtcaggtgccactgaccgggatccagttccagttcccatggtgtatgtggttttttttttttttttttaactgcactcatagggtgctctgaggtcaataaagcagagccaaggccacccagttgcctttttgcctttggtaacataactctgggagtcttggtttatcctgtgtgtcagagagtgggcagaaataacggcctgaaggttactgaggaagaagcactggatgggagactgaaatggacagtctcggagcctgttaatcagctgatcaccttacacatttaataataaaagagctgtacctacacgttgcctttacactgccccccctccatggtcaaatgacctagttcagtcagtgatggggcttccccaggtttggctattgaactgtcacttcaggcccatcctacactgaaagctcttgggtctggctgttctctgtgaaatgctgtagtctctccctttccagaattcaggttcagggcacagaacccaggcttgtaccatggtggtgggagaaaatgaccactggccaagaggactgctgacctgtgcaccaggctagtacttatgactacaaattcttactgcttctctaatcaactctgagggaagagggcatctgatcattacaaaagggagggcttataagtgatctcccaagaaggcagtgatctgctagtgcctttggctctgtacctctgctgggcatctctccaaggtctaaggtaacatattaaatgtttttgtcagctaatgcaggctcagtgactttaagtctgtaagttacccaggaagaaggattataggaaaaataactcagtaagtttaaaaccaaacacatttccatttagtgacaggaatttaagcaaggacctgaagtagaatcaactgattcacacagtagtaaatacaaagtagaacaatgatcttggcttcgctgtctggttcagtggtctgctggaatgcaatacacaagttaagtcacactgcagactgttttctagctgtggccgctggatgccacttctagcatagtagaactatgttaggaggaatgggaaaagtgagcaccacttctcaccatgttcccccctcctgctgccagtctctgctcccatgttggatgcagcagagatcacccaccagttggcccaggacagaccaataggaagggtccaatcactctaactacagccgaactcacctccacaacagtctctgtggctctagcctggactcctttacaggaatccagctctggcagtggcagctggagagggtaatagggcctcctgctgaatgaaggaagttgggtgaatgaatgggtgagctgcagggttcacttgcaaagggaccaggagtgataaggaaacaacaactcattcaggcagctgcttttgacctctaactcccaaacctgcctgttgcatgaggggaagccatctcccatgggagcgaagttaatggggtgggaggctatattctcactattgagtctttccaggagtctcaaggcacaaggctcctggtttcttactctcaaccaccccctacactctttatactctcactccttgtgcttcttcttgtgcttcttcttctttttcttcttctttgctgccttgctgtcttttgatgtgtgccttgccctcttgcctgtatcactctcagagtctgagctgtcagagtcagatgacttcctatctctatgtttctttttcttcttctcctgaaaagaaaattttaaaaatcaacactgtatgtgtatatttgcttttaacaatcatagcacataattggccaggtgcagtggctcacacctgtaatcctagtactttgggaagccgaggtgggaggaatgcttgaggccaggagttcaagatcaacctggctaacatagcaagatctcatctctaaaaagagaaaaaaagaaaaattatagcacacaatcaataggggaccacttaattttcttttagacagtctcgctctgttgcccaggctagagtgcagtgcagtggcacgatcacagctcactgcaacctca

SEQ ID NO: 104 - DNA, 997 bp, Artificial sequence
  Synthetic oligonucleotide
tctgcaggaggggagctgggaacgacctgagctaaagctcggagctgtgcgaagaaaccggaaaagcccagagcacttgcaggggcgggtggggagctagatggtggggtggggtggggacggaggagggccagcaggagacattccgcagggaggggcaagcacgtgtgaggcgggcggggcgcgaagggtcaggcttttgctcaaaacaggcagaggacaaggtcagctcagccgcagaccgagccgctggtgactgtctccgccaccaggcagtgagagtgaagggagagcgcgagctctgaagcccgctagactaagcttgcaatctgagctccattcaccccctcctatttcttgagaccttgtcagttcccctgtgagcctcggactcctcacttgtaaaacgaggacagatgcccgtgccagaagtcaaccagagctttccccggcgtgggcaccagcccaagggcgttttgcttttctagtctcatctctgctctgacgctaagctcaaagagggactgggggacgggaagatatccaccatggcatgcgccctagctctcgggctggtgttggctgcttccttctcagattccagagtgcctagaggccaggaaagggagaaggtcctaccagcctggggtagggactcgggggccaggcactggcgctgacgcaggctagcagggcgccactggctggtccccacccacctcggtgggttgggggatgggcgcaccagcccctcctgggtgagccctagcctggggcttcctatttcgggagccgggggcgtgggccacgtctcctcatgtgatgcgagggctatttaaagcggcagcccgggcagggagccgccgtcggagcccttgcacgcctgctctcttgtagcttctctcagcctagcccagcatcactatggtggacgctttcctgggcacctggaagctagtggacagcaagaatttcgatgactacatgaagtcactcg

SEQ ID NO: 105 - DNA, 173 bp, Artificial sequence
  Synthetic oligonucleotide
gtgtgggttttgctaccaggcaggtggccagcatgaccaagcctaccacaatcatcgaaaagaatggggacattctcaccctaaaaacacacagcaccttcaagaacacagagatcagctttaagttgggggtggagttcgatgagacaacagcagatgacaggaaggtcaag

SEQ ID NO: 106 - DNA, 838 bp, Artificial sequence
  Synthetic oligonucleotide
gtaagatgggcaactttggagctatatctgattggttattactactgctctttcagccaagcctgttctaaaaagccaagtcctcccctgagagctgtagaagctgggacaagagagtggttgtgggtcagggtggtatcaggtgggaattttctgtgtagtggctttggactcacacaggccggaactcaaatcttaccttataggctacatgactgtgggcaaatcaccttttccaagtgcaactgtaaaacgggtattaataataccaaccttgtagggctgctgggaagcctgtaagagacagtgtatgcacagcacaaagcatcactgattgaggaacacagcaggtgctccatgtcctttgtttgctcttcctgtgtttctaccttgcctcacctcaggaagaagtagaaaacagggccaaatctgatcccaggccctctaggaggggctcccattgcctatctcagcattccctttcctctcctccctaggactgcattgtcacttgcagggacaggctcgtgactggtggggacactgaatgacagtacagtcctttcttccccattctagtcctaccccattttcatgctttctatgtctggcctactgaaactacttgactactgcttgggtaggaagtaccacagccaggctggcagatctgttcaagcttggggacttcacttggagaatctagccttgactgaattccccccagacccagggagagcagccaactgtggattctgcctaaccacagggcctcaggttttcacctaggcatcttcactgcacaccttcttgggtcagcataacctgttaactgcat

SEQ ID NO: 107 - DNA, 2226 bp, Artificial sequence
  Synthetic oligonucleotide
acactcacccacggcactgcagtttgcactcgcacttatgagaaagaggcatgacctgactgcactgttgctgactactactctgccaatcggctacccctcgactcagcaccacattgcctcatttcttcctctgcattttgtacaaatccacgaattcttctggggtcaggtgccactgaccgggatccagttccagttcccatggtgtatgtggttttttttttttttttttaactgcactcatagggtgctctgaggtcaataaagcagagccaaggccacccagttgcctttttgcctttggtaacataactctgggagtcttggtttatcctgtgtgtcagagagtgggcagaaataacggcctgaaggttactgaggaagaagcactggatgggagactgaaatggacagtctcggagcctgttaatcagctgatcaccttacacatttaataataaaagagctgtacctacacgttgcctttacactgccccccctccatggtcaaatgacctagttcagtcagtgatggggcttccccaggtttggctattgaactgtcacttcaggcccatcctacactgaaagctcttgggtctggctgttctctgtgaaatgctgtagtctctccctttccagaattcaggttcagggcacagaacccaggcttgtaccatggtggtgggagaaaatgaccactggccaagaggactgctgacctgtgcaccaggctagtacttatgactacaaattcttactgcttctctaatcaactctgagggaagagggcatctgatcattacaaaagggagggcttataagtgatctcccaagaaggcagtgatctgctagtgcctttggctctgtacctctgctgggcatctctccaaggtctaaggtaacatattaaatgtttttgtcagctaatgcaggctcagtgactttaagtctgtaagttacccaggaagaaggattataggaaaaataactcagtaagtttaaaaccaaacacatttccatttagtgacaggaatttaagcaaggacctgaagtagaatcaactgattcacacagtagtaaatacaaagtagaacaatgatcttggcttcgctgtctggttcagtggtctgctggaatgcaatacacaagttaagtcacactgcagactgttttctagctgtggccgctggatgccacttctagcatagtagaactatgttaggaggaatgggaaaagtgagcaccacttctcaccatgttcccccctcctgctgccagtctctgctcccatgttggatgcagcagagatcacccaccagttggcccaggacagaccaataggaagggtccaatcactctaactacagccgaactcacctccacaacagtctctgtggctctagcctggactcctttacaggaatccagctctggcagtggcagctggagagggtaatagggcctcctgctgaatgaaggaagttgggtgaatgaatgggtgagctgcagggttcacttgcaaagggaccaggagtgataaggaaacaacaactcattcaggcagctgcttttgacctctaactcccaaacctgcctgttgcatgaggggaagccatctcccatgggagcgaagttaatggggtgggaggctatattctcactattgagtctttccaggagtctcaaggcacaaggctcctggtttcttactctcaaccaccccctacactctttatactctcactccttgtgcttcttcttgtgcttcttcttctttttcttcttctttgctgccttgctgtcttttgatgtgtgccttgccctcttgcctgtatcactctcagagtctgagctgtcagagtcagatgacttcctatctctatgtttctttttcttcttctcctgaaaagaaaattttaaaaatcaacactgtatgtgtatatttgcttttaacaatcatagcacataattggccaggtgcagtggctcacacctgtaatcctagtactttgggaagccgaggtgggaggaatgcttgaggccaggagttcaagatcaacctggctaacatagcaagatctcatctctaaaaagagaaaaaaagaaaaattatagcacacaatcaataggggaccacttaattttcttttagacagtctcgctctgttgcccaggctagagtgcagtgcagtggcacgatcacagctcactgcaacctca

SEQ ID NO: 108 - DNA, 461 bp, Artificial sequence
  Synthetic oligonucleotide
gatgttctgacagcctggccaagcatctacaggagacaagtcaaagttttaagagaagatgaaataacaattcttccttggcatctccaatggagtagagagaaggcaacaaagcttctcagacccacattaccgagctataacaaccatggctgggaggagctgagagttggcaaatcaatagtttagctatgttgctgaaccttcctggatggcaagaccatggaagtccatcacaagatattatggggtcaggagcctcactgggttctgccccttatataggtgaatatcctgggaaagtaaaaatgaaaatacagagtctggcaccagttccctgcaagcctggtccagcctggataaagaagtgaggagagtaataatactgccttacacctaaacagtgctttagtttatcaagctttttgcatccttatcttacaataatagtctgtagagtc

SEQ ID NO: 109 - DNA, 550 bp, Artificial sequence
  Synthetic oligonucleotide
atggaaaaactgcaactcagaaatgtaaagtgagtcgaccaaggctaaagcggcaaaaccactatactttataacacagagtttggcactatttccactttgttctctctcaaagatgaaggctcaggaggagggaagataaaaacaaatcactggagagtcctggcatgctggaacatggactctagctagcaagaagggctcaaggaggtggccttctcctagacctcaactttgatgcaaaagctgttttgcagcctgaacaaagacaatccaatcctccagcaaatggcgtcattttccctacgtgtctagccttgagctacagaacaaaagaacaatcacatccgaagttgtagttcgcctggttgcggtggctcacgcctgtgatcccagcactttgggaggccaaggtgggtggatcacctgaggtcaggaggtcgagactagcctgaccaacatgaagaaaccccatctctactaaaaatacaaaattagctgggcgtggtggcacatgcctgtaatcccagctactcgggaggctgaggca

SEQ ID NO: 110 - DNA, 33 bp, Artificial sequence
  Synthetic oligonucleotide
ctcatatactcataaccttccccctaccctcag

SEQ ID NO: 111 - DNA, 102 bp, Artificial sequence
  Synthetic oligonucleotide
tccattgtgacactggatggagggaaacttgttcacctgcagaaatgggacgggcaagagaccacacttgtgcgggagctaattgatggaaaactcatcctg

SEQ ID NO: 112 - protein, 132 aa, Homo sapiens
VDAFLGTWKLVDSKNFDDYMKSLGVGFATRQVASMTKPTTIIEKNGDILTLKTHSTFKNTEISFKLGVEFDETTADDRKVKSIVTLDGGKLVHLQKWDGQETTLVRELIDGKLILTLTHGTAVCTRTYEKEA

SEQ ID NO: 113 - protein, 133 aa, Homo sapiens [sequence omitted]

SEQ ID NO: 114 - protein, 215 aa, Homo sapiens
MVDAFLGTWKLVDSKNFDDYMKSLGVGFATRQVASMTKPTTIIEKNGDILTLKTHSTFKNTEISFKLGVEFDETTADDRKVKSIVTLDGGKLVHLQKWDGQETTLVRELIDGKLILVRWATLELYLIGYYYCSFSQACSKKPSPPLRAVEAGTREWLWVRVVSGGNFLCSGFGLTQAGTQILPYRLHDCGQITFSKCNCKTGINNTNLVGLLGSL

SEQ ID NO: 115 - protein, 178 aa, Homo sapiens
MVDAFLGTWKLVDSKNFDDYMKSLGVGFATRQVASMTKPTTIIEKNGDILTLKTHSTFKNTEISFKLGVEFDETTADDRKVKSIVTLDGGKLVHLQKWDGQETTLVRELIDGKLILDVLTAWPSIYRRQVKVLREDEITILPWHLQWSREKATKLLRPTLPSYNNHGWEELRVGKSIV

SEQ ID NO: 116 - protein, 126 aa, Homo sapiens
MVDAFLGTWKLVDSKNFDDYMKSLGVGFATRQVASMTKPTTIIEKNGDILTLKTHSTFKNTEISFKLGVEFDETTADDRKVKSIVTLDGGKLVHLQKWDGQETTLVRELIDGKLILMEKLQLRNVK

SEQ ID NO: 117 - protein, 144 aa, Homo sapiens
MVDAFLGTWKLVDSKNFDDYMKSLAHILITFPLPSGVGFATRQVASMTKPTTIIEKNGDILTLKTHSTFKNTEISFKLGVEFDETTADDRKVKSIVTLDGGKLVHLQKWDGQETTLVRELIDGKLILTLTHGTAVCTRTYEKEA

SEQ ID NO: 118 - DNA, 22 bp, Homo sapiens
tcccctgagagctgtagaagct

SEQ ID NO: 119 - DNA, 19 bp, Homo sapiens
cggcctgtgtgagtccaaa

SEQ ID NO: 120 - DNA, 101 bp, Artificial sequence
  Synthetic oligonucleotide
tcccctgagagctgtagaagctgggacaagagagtggttgtgggtcagggtggtatcaggtgggaattttctgtgtagtggctttggactcacacaggccg

SEQ ID NO: 121 - DNA, 20 bp, Artificial sequence
  Synthetic oligonucleotide
ttccttggcatctccaatgg

SEQ ID NO: 122 - DNA, 20 bp, Artificial sequence
  Synthetic oligonucleotide
gccaactctcagctcctccc

SEQ ID NO: 123 - DNA, 101 bp, Artificial sequence
  Synthetic oligonucleotide
ttccttggcatctccaatggagtagagagaaggcaacaaagcttctcagacccacattaccgagctataacaaccatggctgggaggagctgagagttggc

SEQ ID NO: 124 - DNA, 21 bp, Artificial sequence
  Synthetic oligonucleotide
ccaagcctaccacaatcatcg

SEQ ID NO: 125 - DNA, 21 bp, Artificial sequence
  Synthetic oligonucleotide
ctccacccccaacttaaagct

SEQ ID NO: 126 - DNA, 101 bp, Artificial sequence
  Synthetic oligonucleotide
ccaagcctaccacaatcatcgaaaagaatggggacattctcaccctaaaaacacacagcaccttcaagaacacagagatcagctttaagttgggggtggag

SEQ ID NO: 127 - DNA, 1396 bp, Homo sapiens
aggcgcggaggggctcattcccgggccctgatctcagaggcccggaatgtggctgataaatcagagataaccctgcatggcagggcaggcccgacactcagctccaggataaaaggccacggtgtcccgaggagccaggaggagcaccccgcaggctgagggcaggtgggaagcaaacccggacgcatcgcagcagcagcagcagcagcagaagcagcagcagcagcctccgcagtccctccagagacatggatccccagacagcaccttcccgggcgctcctgctcctgctcttcttgcatctggctttcctgggaggtcgttcccacccgctgggcagccccggttcagcctcggacttggaaacgtccgggttacaggagcagcgcaaccatttgcagggcaaactgtcggagctgcaggtggagcagacatccctggagcccctccaggagagcccccgtcccacaggtgtctggaagtcccgggaggtagccaccgagggcatccgtgggcaccgcaaaatggtcctctacaccctgcgggcaccacgaagccccaagatggtgcaagggtctggctgctttgggaggaagatggaccggatcagctcctccagtggcctgggctgcaaaggtaagcaccccctgccaccccggccgccttcccccattccagtgtgtgacactgttagagtcactttggggtttgttgtctctgggaaccacactctttgagaaaaggtcacctggacatcgcttcctcttgttaacagccttcagggccaaggggtgcctttgtggaattagtaaatgtgggcttatttcattaccatgcccacaataccttctccccacctcctacttcttatcaaaggggcagaatctcctttgggggtctgtttatcatttggcagccccccagtggtgcagaaagagaaccaaacatttcctcctggtttcctctaaactgtctatagtctcaaaggcagagagcaggatcaccagagcaatgataatccccaatttacagatgaggaaactgaggctcagagagttgcattaagcctcaaacgtctgatgactaacagggtggtgggtggcacacgatgaggtaagctcagcccctgcctccatctcccaccctaaccatcatcaccctctctctttccctgacagtgctgaggcggcattaagaggaagtcctggctgcagacacctgcttctgattccacaaggggctttttcctcaaccctgtggccgcctttgaagtgactcatttttttaatgtatttatgtatttatttgattgttttatataagatggtttcttacctttgagcacaaaatttccacggtgaaataaagtcaacattataagctttatcttttgaaa

SEQ ID NO: 128 - DNA, 1086 bp, Homo sapiens
aggcgcggaggggctcattcccgggccctgatctcagaggcccggaatgtggctgataaatcagagataaccctgcatggcagggcaggcccgacactcagctccaggataaaaggccacggtgtcccgaggagccaggaggagcaccccgcaggctgagggcaggtgggaagcaaacccggacgcatcgcagcagcagcagcagcagcagaagcagcagcagcagcctccgcagtccctccagagacatggatccccagacagcaccttcccgggcgctcctgctcctgctcttcttgcatctggctttcctgggaggtcgttcccacccgctgggcagccccggttcagcctcggacttggaaacgtccgggttacaggtgagagcggagggcagctcagggggattggacagcagcaatgaaagggtcctcacctgctgtcccaagaggccctcatctttcctttggaattagtgataaaggaatcagaaaatggagagactgggtgccctgaccctgtacccaaggcagtcggttcacttgggtgccatgaagggctggtgagcccaggggtgggtccctgaggcttggacgcccccattcattgcaggagcagcgcaaccatttgcagggcaaactgtcggagctgcaggtggagcagacatccctggagcccctccaggagagcccccgtcccacaggtgtctggaagtcccgggaggtagccaccgagggcatccgtgggcaccgcaaaatggtcctctacaccctgcgggcaccacgaagccccaagatggtgcaagggtctggctgctttgggaggaagatggaccggatcagctcctccagtggcctgggctgcaaagtgctgaggcggcattaagaggaagtcctggctgcagacacctgcttctgattccacaaggggctttttcctcaaccctgtggccgcctttgaagtgactcatttttttaatgtatttatgtatttatttgattgttttatataagatggtttcttacctttgagcacaaaatttccacggtgaaataaagtcaacattataagctttatcttttgaaa

SEQ ID NO: 129 - DNA, 1628 bp, Homo sapiens
aggcgcggaggggctcattcccgggccctgatctcagaggcccggaatgtggctgataaatcagagataaccctgcatggcagggcaggcccgacactcagctccaggataaaaggccacggtgtcccgaggagccaggaggagcaccccgcaggctgagggcaggtgggaagcaaacccggacgcatcgcagcagcagcagcagcagcagaagcagcagcagcagcctccgcagtccctccagagacatggatccccagacagcaccttcccgggcgctcctgctcctgctcttcttgcatctggctttcctgggaggtcgttcccacccgctgggcagccccggttcagcctcggacttggaaacgtccgggttacaggtgagagcggagggcagctcagggggattggacagcagcaatgaaagggtcctcacctgctgtcccaagaggccctcatctttcctttggaattagtgataaaggaatcagaaaatggagagactgggtgccctgaccctgtacccaaggcagtcggttcacttgggtgccatgaagggctggtgagcccaggggtgggtccctgaggcttggacgcccccattcattgcaggagcagcgcaaccatttgcagggcaaactgtcggagctgcaggtggagcagacatccctggagcccctccaggagagcccccgtcccacaggtgtctggaagtcccgggaggtagccaccgagggcatccgtgggcaccgcaaaatggtcctctacaccctgcgggcaccacgaagccccaagatggtgcaagggtctggctgctttgggaggaagatggaccggatcagctcctccagtggcctgggctgcaaaggtaagcaccccctgccaccccggccgccttcccccattccagtgtgtgacactgttagagtcactttggggtttgttgtctctgggaaccacactctttgagaaaaggtcacctggacatcgcttcctcttgttaacagccttcagggccaaggggtgcctttgtggaattagtaaatgtgggcttatttcattaccatgcccacaataccttctccccacctcctacttcttatcaaaggggcagaatctcctttgggggtctgtttatcatttggcagccccccagtggtgcagaaagagaaccaaacatttcctcctggtttcctctaaactgtctatagtctcaaaggcagagagcaggatcaccagagcaatgataatccccaatttacagatgaggaaactgaggctcagagagttgcattaagcctcaaacgtctgatgactaacagggtggtgggtggcacacgatgaggtaagctcagcccctgcctccatctcccaccctaaccatcatcaccctctctctttccctgacagtgctgaggcggcattaagaggaagtcctggctgcagacacctgcttctgattccacaaggggctttttcctcaaccctgtggccgcctttgaagtgactcatttttttaatgtatttatgtatttatttgattgttttatataagatggtttcttacctttgagcacaaaatttccacggtgaaataaagtcaacattataagctttatcttttgaaa

SEQ ID NO: 130 - DNA, 586 bp, Homo sapiens
aggcgcggaggggctcattcccgggccctgatctcagaggcccggaatgtggctgataaatcagagataaccctgcatggcagggcaggcccgacactcagctccaggataaaaggccacggtgtcccgaggagccaggaggagcaccccgcaggctgagggcaggtgggaagcaaacccggacgcatcgcagcagcagcagcagcagcagaagcagcagcagcagcctccgcagtccctccgtgggcaccgcaaaatggtcctctacaccctgcgggcaccacgaagccccaagatggtgcaagggtctggctgctttgggaggaagatggaccggatcagctcctccagtggcctgggctgcaaagtgctgaggcggcattaagaggaagtcctggctgcagacacctgcttctgattccacaaggggctttttcctcaaccctgtggccgcctttgaagtgactcatttttttaatgtatttatgtatttatttgattgttttatataagatggtttcttacctttgagcacaaaatttccacggtgaaataaagtcaacattataagctttatcttttgaaa

SEQ ID NO: 131 - DNA, 240 bp, Artificial sequence
  Synthetic oligonucleotide
aggcgcggaggggctcattcccgggccctgatctcagaggcccggaatgtggctgataaatcagagataaccctgcatggcagggcaggcccgacactcagctccaggataaaaggccacggtgtcccgaggagccaggaggagcaccccgcaggctgagggcaggtgggaagcaaacccggacgcatcgcagcagcagcagcagcagcagaagcagcagcagcagcctccgcagtccct

SEQ ID NO: 132 - DNA, 140 bp, Artificial sequence
  Synthetic oligonucleotide
ccagagacatggatccccagacagcaccttcccgggcgctcctgctcctgctcttcttgcatctggctttcctgggaggtcgttcccacccgctgggcagccccggttcagcctcggacttggaaacgtccgggttacag

SEQ ID NO: 133 - DNA, 232 bp, Artificial sequence
  Synthetic oligonucleotide
gtgagagcggagggcagctcagggggattggacagcagcaatgaaagggtcctcacctgctgtcccaagaggccctcatctttcctttggaattagtgataaaggaatcagaaaatggagagactgggtgccctgaccctgtacccaaggcagtcggttcacttgggtgccatgaagggctggtgagcccaggggtgggtccctgaggcttggacgcccccattcattgcag

SEQ ID NO: 134 - DNA, 128 bp, Artificial sequence
  Synthetic oligonucleotide
gagcagcgcaaccatttgcagggcaaactgtcggagctgcaggtggagcagacatccctggagcccctccaggagagcccccgtcccacaggtgtctggaagtcccgggaggtagccaccgagggcat

SEQ ID NO: 135 - DNA, 128 bp, Artificial sequence
  Synthetic oligonucleotide
ccgtgggcaccgcaaaatggtcctctacaccctgcgggcaccacgaagccccaagatggtgcaagggtctggctgctttgggaggaagatggaccggatcagctcctccagtggcctgggctgcaaag

SEQ ID NO: 136 - DNA, 542 bp, Artificial sequence
  Synthetic oligonucleotide
gtaagcaccccctgccaccccggccgccttcccccattccagtgtgtgacactgttagagtcactttggggtttgttgtctctgggaaccacactctttgagaaaaggtcacctggacatcgcttcctcttgttaacagccttcagggccaaggggtgcctttgtggaattagtaaatgtgggcttatttcattaccatgcccacaataccttctccccacctcctacttcttatcaaaggggcagaatctcctttgggggtctgtttatcatttggcagccccccagtggtgcagaaagagaaccaaacatttcctcctggtttcctctaaactgtctatagtctcaaaggcagagagcaggatcaccagagcaatgataatccccaatttacagatgaggaaactgaggctcagagagttgcattaagcctcaaacgtctgatgactaacagggtggtgggtggcacacgatgaggtaagctcagcccctgcctccatctcccaccctaaccatcatcaccctctctctttccctgacag

SEQ ID NO: 137 - DNA, 218 bp, Artificial sequence
  Synthetic oligonucleotide
tgctgaggcggcattaagaggaagtcctggctgcagacacctgcttctgattccacaaggggctttttcctcaaccctgtggccgcctttgaagtgactcatttttttaatgtatttatgtatttatttgattgttttatataagatggtttcttacctttgagcacaaaatttccacggtgaaataaagtcaacattataagctttatcttttgaaa

SEQ ID NO: 138 - protein, 134 aa, Homo sapiens
MDPQTAPSRALLLLLFLHLAFLGGRSHPLGSPGSASDLETSGLQEQRNHLQGKLSELQVEQTSLEPLQESPRPTGVWKSREVATEGIRGHRKMVLYTLRAPRSPKMVQGSGCFGRKMDRISSSSGLGCKVLRRH

SEQ ID NO: 139 - protein, 162 aa, Homo sapiens
MDPQTAPSRALLLLLFLHLAFLGGRSHPLGSPGSASDLETSGLQEQRNHLQGKLSELQVEQTSLEPLQESPRPTGVWKSREVATEGIRGHRKMVLYTLRAPRSPKMVQGSGCFGRKMDRISSSSGLGCKGKHPLPPRPPSPIPVCDTVRVTLGFVVSGNHTL

SEQ ID NO: 140 - protein, 75 aa, Homo sapiens
MDPQTAPSRALLLLLFLHLAFLGGRSHPLGSPGSASDLETSGLQVRAEGSSGGLDSSNERVLTCCPKRPSSFLWN

SEQ ID NO: 141 - protein, 42 aa, Homo sapiens
MVLYTLRAPRSPKMVQGSGCFGRKMDRISSSSGLGCKVLRRH

SEQ ID NO: 142 - DNA, 20 bp, Artificial sequence
  Synthetic oligonucleotide
gtccgggttacaggagcagc

SEQ ID NO: 143 - DNA, 19 bp, Artificial sequence
  Synthetic oligonucleotide
ccgcctcagcactttgcag

SEQ ID NO: 144 - DNA, 280 bp, Artificial sequence
  Synthetic oligonucleotide
gtccgggttacaggagcagcgcaaccatttgcagggcaaactgtcggagctgcaggtggagcagacatccctggagcccctccaggagagcccccgtcccacaggtgtctggaagtcccgggaggtagccaccgagggcatccgtgggcaccgcaaaatggtcctctacaccctgcgggcaccacgaagccccaagatggtgcaagggtctggctgctttgggaggaagatggaccggatcagctcctccagtggcctgggctgcaaagtgctgaggcgg

SEQ ID NO: 145 - DNA, 20 bp, Artificial sequence
  Synthetic oligonucleotide
gcagcaatgaaagggtcctc

SEQ ID NO: 146 - DNA, 19 bp, Artificial sequence
  Synthetic oligonucleotide
catggcacccaagtgaacc

SEQ ID NO: 147 - DNA, 140 bp, Artificial sequence
  Synthetic oligonucleotide
gcagcaatgaaagggtcctcacctgctgtcccaagaggccctcatctttcctttggaattagtgataaaggaatcagaaaatggagagactgggtgccctgaccctgtacccaaggcagtcggttcacttgggtgccatg

SEQ ID NO: 148 - DNA, 20 bp, Artificial sequence
  Synthetic oligonucleotide
cttcccccattccagtgtgt

SEQ ID NO: 149 - DNA, 20 bp, Artificial sequence
  Synthetic oligonucleotide
gaggaagcgatgtccaggtg

SEQ ID NO: 150 - DNA, 102 bp, Artificial sequence
  Synthetic oligonucleotide
cttcccccattccagtgtgtgacactgttagagtcactttggggtttgttgtctctgggaaccacactctttgagaaaaggtcacctggacatcgcttcctc

SEQ ID NO: 151 - DNA, 1963 bp, Homo sapiens
cggggagacagggacagacgtaggccaagagaggggaaccagagaggaaccagaggggagagacagagcagcaagcagtggattgctccttgacgacgccagcatgagctccttctccaccaccaccgtgagcttcctccttttactggcattccagctcctaggtcagaccagagctaatcccatgtacaatgccgtgtccaacgcagacctgatggatttcaagaatttgctggaccatttggaagaaaagatgcctttagaagatgaggtcgtgcccccacaagtgctcagtgagccgaatgaagaagcgggggctgctctcagccccctccctgaggtgcctccctggaccggggaagtcagcccagcccagagagatggaggtgccctcgggcggggcccctgggactcctctgatcgatctgccctcctaaaaagcaagctgagggcgctgctcactgcccctcggagcctgcggagatccagctgcttcgggggcaggatggacaggattggagcccagagcggactgggctgtaacagcttccgggtaagaggaactggggatggaaatgggatgggatggacactactgggagacaccttcagcaggaaagggaccaatgcagaagctcattccctctcaagtttctgccccaacacccagagtgccccatgggtgtcaggacatgccatctattgtccttagctagtctgctgagaaaatgcttaaaaaaaaaaggggggggggctgggcacagtggctcacgcctgtaatcccagcactttgggaggccgaggcaggcggatcatgaggtcaagagatcaagactatcctggccaacatggtgaaaccccagctctactaaaaatacaaaaattagctgggtgtggtggcgggcacctgtactctcagctacttgggaggctgaggcaggagaatcacttgaacccaggaggcagaggttgcagtgagcagagatcacgccactgcagtccagcctaggtgatagagcgagactgtctcaaaaaaaaaaaaaaaaggccaggcacggtggctcacgcctgtaatcccagcgctttgggaggccaaggcgggtggatcacgaggtcaggagatggagaccatcctggctaacacggtgaaaccccgtctctactaaaaatacaaaaaattagccaggcgtggtggcaggcgcctgtaagtcctagctactccggaggctgaggcaggagaatggcgtgaacccgggaggcggagcttgcagtgagcagagatggcaccactgcactccagcctgggcgacagagcaagactccgtctcaaaaaaaaaaaaaaaaaaagcaactgccactagcactgggaaattaaaatattcatagagccaagttatctttgcatggctgattagcagttcatattcctccccagaattgcaagatcctgaagggcttaagtgaaatttactctgatgagtaacttgcttatcaattcatgaagctcagagggtcatcaggctggggtgggggccggtgggaagcaggtggtcagtaatcaagttcagaggatgggcacactcatacatgaagctgacttttccaggacagccaggtcaccaagccagatatgtctgtgttctctttgcagtactgaagataacagccagggaggacaagcagggctgggcctagggacagactgcaagaggctcctgtcccctggggtctctgctgcatttgtgtcatcttgttgccatggagttgtgatcatcccatctaagctgcagcttcctgtcaacacttctcacatcttatgctaactgtagataaagtggtttgatggtgacttcctcgcctctcccaccccatgcattaaattttaaggtagaacctcacctgttactgaaagtggtttgaaagtgaataaacttcagcaccatggacagaagacaaaaaaaag

SEQ ID NO: 152 - DNA, 987 bp, Homo sapiens
cggggagacagggacagacgtaggccaagagaggggaaccagagaggaaccagaggggagagacagagcagcaagcagtggattgctccttgacgacgccagcatgagctccttctccaccaccaccgtgagcttcctccttttactggcattccagctcctaggtcagaccagagctaatcccatgtacaatgccgtgtccaacgcagacctgatggatttcaaggtagggccaggaaagcgggtgcagtctggggccagggggctttctgatgctgtgctcactcctcttgatttcctccaagtcagtgaggtttatccctttccctgtattttccttttctaaagaatttgctggaccatttggaagaaaagatgcctttagaagatgaggtcgtgcccccacaagtgctcagtgagccgaatgaagaagcgggggctgctctcagccccctccctgaggtgcctccctggaccggggaagtcagcccagcccagagagatggaggtgccctcgggcggggcccctgggactcctctgatcgatctgccctcctaaaaagcaagctgagggcgctgctcactgcccctcggagcctgcggagatccagctgcttcgggggcaggatggacaggattggagcccagagcggactgggctgtaacagcttccggtactgaagataacagccagggaggacaagcagggctgggcctagggacagactgcaagaggctcctgtcccctggggtctctgctgcatttgtgtcatcttgttgccatggagttgtgatcatcccatctaagctgcagcttcctgtcaacacttctcacatcttatgctaactgtagataaagtggtttgatggtgacttcctcgcctctcccaccccatgcattaaattttaaggtagaacctcacctgttactgaaagtggtttgaaagtgaataaacttcagcaccatggacagaagacaaaaaaaag

SEQ ID NO: 153 - DNA, 2085 bp, Homo sapiens
cggggagacagggacagacgtaggccaagagaggggaaccagagaggaaccagaggggagagacagagcagcaagcagtggattgctccttgacgacgccagcatgagctccttctccaccaccaccgtgagcttcctccttttactggcattccagctcctaggtcagaccagagctaatcccatgtacaatgccgtgtccaacgcagacctgatggatttcaaggtagggccaggaaagcgggtgcagtctggggccagggggctttctgatgctgtgctcactcctcttgatttcctccaagtcagtgaggtttatccctttccctgtattttccttttctaaagaatttgctggaccatttggaagaaaagatgcctttagaagatgaggtcgtgcccccacaagtgctcagtgagccgaatgaagaagcgggggctgctctcagccccctccctgaggtgcctccctggaccggggaagtcagcccagcccagagagatggaggtgccctcgggcggggcccctgggactcctctgatcgatctgccctcctaaaaagcaagctgagggcgctgctcactgcccctcggagcctgcggagatccagctgcttcgggggcaggatggacaggattggagcccagagcggactgggctgtaacagcttccgggtaagaggaactggggatggaaatgggatgggatggacactactgggagacaccttcagcaggaaagggaccaatgcagaagctcattccctctcaagtttctgccccaacacccagagtgccccatgggtgtcaggacatgccatctattgtccttagctagtctgctgagaaaatgcttaaaaaaaaaaggggggggggctgggcacagtggctcacgcctgtaatcccagcactttgggaggccgaggcaggcggatcatgaggtcaagagatcaagactatcctggccaacatggtgaaaccccagctctactaaaaatacaaaaattagctgggtgtggtggcgggcacctgtactctcagctacttgggaggctgaggcaggagaatcacttgaacccaggaggcagaggttgcagtgagcagagatcacgccactgcagtccagcctaggtgatagagcgagactgtctcaaaaaaaaaaaaaaaaggccaggcacggtggctcacgcctgtaatcccagcgctttgggaggccaaggcgggtggatcacgaggtcaggagatggagaccatcctggctaacacggtgaaaccccgtctctactaaaaatacaaaaaattagccaggcgtggtggcaggcgcctgtaagtcctagctactccggaggctgaggcaggagaatggcgtgaacccgggaggcggagcttgcagtgagcagagatggcaccactgcactccagcctgggcgacagagcaagactccgtctcaaaaaaaaaaaaaaaaaaagcaactgccactagcactgggaaattaaaatattcatagagccaagttatctttgcatggctgattagcagttcatattcctccccagaattgcaagatcctgaagggcttaagtgaaatttactctgatgagtaacttgcttatcaattcatgaagctcagagggtcatcaggctggggtgggggccggtgggaagcaggtggtcagtaatcaagttcagaggatgggcacactcatacatgaagctgacttttccaggacagccaggtcaccaagccagatatgtctgtgttctctttgcagtactgaagataacagccagggaggacaagcagggctgggcctagggacagactgcaagaggctcctgtcccctggggtctctgctgcatttgtgtcatcttgttgccatggagttgtgatcatcccatctaagctgcagcttcctgtcaacacttctcacatcttatgctaactgtagataaagtggtttgatggtgacttcctcgcctctcccaccccatgcattaaattttaaggtagaacctcacctgttactgaaagtggtttgaaagtgaataaacttcagcaccatggacagaagacaaaaaaaag

SEQ ID NO: 154 - DNA, 127 bp, Artificial sequence
  Synthetic oligonucleotide
cggggagacagggacagacgtaggccaagagaggggaaccagagaggaaccagaggggagagacagagcagcaagcagtggattgctccttgacgacgccagcatgagctccttctccaccaccacc

SEQ ID NO: 155 - DNA, 122 bp, Artificial sequence
  Synthetic oligonucleotide
gtagggccaggaaagcgggtgcagtctggggccagggggctttctgatgctgtgctcactcctcttgatttcctccaagtcagtgaggtttatccctttccctgtattttccttttctaaag

SEQ ID NO: 156 - DNA, 327 bp, Artificial sequence
  Synthetic oligonucleotide
aatttgctggaccatttggaagaaaagatgcctttagaagatgaggtcgtgcccccacaagtgctcagtgagccgaatgaagaagcgggggctgctctcagccccctccctgaggtgcctccctggaccggggaagtcagcccagcccagagagatggaggtgccctcgggcggggcccctgggactcctctgatcgatctgccctcctaaaaagcaagctgagggcgctgctcactgcccctcggagcctgcggagatccagctgcttcgggggcaggatggacaggattggagcccagagcggactgggctgtaacagcttccgg

SEQ ID NO: 157 - DNA, 747 bp, Artificial sequence
  Synthetic oligonucleotide
gtaagaggaactggggatggaaatgggatgggatggacactactgggagacaccttcagcaggaaagggaccaatgcagaagctcattccctctcaagtttctgccccaacacccagagtgccccatgggtgtcaggacatgccatctattgtccttagctagtctgctgagaaaatgcttaaaaaaaaaaggggggggggctgggcacagtggctcacgcctgtaatcccagcactttgggaggccgaggcaggcggatcatgaggtcaagagatcaagactatcctggccaacatggtgaaaccccagctctactaaaaatacaaaaattagctgggtgtggtggcgggcacctgtactctcagctacttgggaggctgaggcaggagaatcacttgaacccaggaggcagaggttgcagtgagcagagatcacgccactgcagtccagcctaggtgatagagcgagactgtctcaaaaaaaaaaaaaaaaggccaggcacggtggctcacgcctgtaatcccagcgctttgggaggccaaggcgggtggatcacgaggtcaggagatggagaccatcctggctaacacggtgaaaccccgtctctactaaaaatacaaaaaattagccaggcgtggtggcaggcgcctgtaagtcctagctactccggaggctgaggcaggagaatggcgtgaacccgggaggcggagcttgcagtgagcagagatggcaccactgcactccag

SEQ ID NO: 158 - DNA, 351 bp, Artificial sequence
  Synthetic oligonucleotide
cctgggcgacagagcaagactccgtctcaaaaaaaaaaaaaaaaaaagcaactgccactagcactgggaaattaaaatattcatagagccaagttatctttgcatggctgattagcagttcatattcctccccagaattgcaagatcctgaagggcttaagtgaaatttactctgatgagtaacttgcttatcaattcatgaagctcagagggtcatcaggctggggtgggggccggtgggaagcaggtggtcagtaatcaagttcagaggatgggcacactcatacatgaagctgacttttccaggacagccaggtcaccaagccagatatgtctgtgttctctttgcag

SEQ ID NO: 159 - DNA, 132 bp, Artificial sequence
  Synthetic oligonucleotide
tactgaagataacagccagggaggacaagcagggctgggcctagggacagactgcaagaggctcctgtcccctggggtctctgctgcatttgtgtcatcttgttgccatggagttgtgatcatcccatctaa

SEQ ID NO: 160 - DNA, 128 bp, Artificial sequence
  Synthetic oligonucleotide
gctgcagcttcctgtcaacacttctcacatcttatgctaactgtagataaagtggtttgatggtgacttcctcgcctctcccaccccatgcattaaattttaaggtagaacctcacctgttactgaaa

SEQ ID NO: 161 - DNA, 99 bp, Artificial sequence
  Synthetic oligonucleotide
gtgagcttcctccttttactggcattccagctcctaggtcagaccagagctaatcccatgtacaatgccgtgtccaacgcagacctgatggatttcaag

SEQ ID NO: 162 - DNA, 11 bp, Artificial sequence
  Synthetic oligonucleotide
gtggtttgaaa

SEQ ID NO: 163 - DNA, 41 bp, Artificial sequence
  Synthetic oligonucleotide
gtgaataaacttcagcaccatggacagaagacaaaaaaaag

SEQ ID NO: 164 - protein, 153 aa, Homo sapiens [sequence omitted]

SEQ ID NO: 165 - protein, 202 aa, Homo sapiens
MSSFSTTTVSFLLLLAFQLLGQTRANPMYNAVSNADLMDFKNLLDHLEEKMPLEDEVVPPQVLSEPNEEAGAALSPLPEVPPWTGEVSPAQRDGGALGRGPWDSSDRSALLKSKLRALLTAPRSLRRSSCFGGRMDRIGAQSGLGCNSFRVRGTGDGNGMGWTLLGDTFSRKGTNAEAHSLSSFCPNTQSAPWVSGHAIYCP

SEQ ID NO: 166 - protein, 80 aa, Homo sapiens [sequence omitted]

SEQ ID NO: 167 - DNA, 8921 bp, Homo sapiens
gaggacagatagagagactcctgcggcccagattcttcaggattctccgtgaagggataaccaggggaagcaccaagatgaccgatgcccagatggctgactttggggcagcggcccagtacctccgcaagtcagagaaggagcgtctagaggcccagacccggccctttgacattcgcactgagtgcttcgtgcccgatgacaaggaagagtttgtcaaagccaagattttgtcccgggagggaggcaaggtcattgctgaaaccgagaatgggaagacggtgactgtgaaggaggaccaggtgttgcagcagaacccacccaagttcgacaagattgaggacatggccatgctgaccttcctgcacgagcccgcggtgcttttcaacctcaaggagcgctacgcggcctggatgatatatacctactcgggcctcttctgtgtcactgtcaacccctacaagtggctgccggtgtacaatgccgaagtggtggccgcctacaggggcaagaagaggagtgaggccccgccccacatcttctccatctccgacaacgcctatcagtacatgctgacagatcgggagaaccagtccatcctcatcacgggagaatccggggcggggaagactgtgaacaccaagcgtgtcatccagtactttgccagcattgcagccataggtgaccgtggcaagaaggacaatgccaatgcgaacaagggcaccctggaggaccagatcatccaggccaaccccgctctggaggccttcggcaatgccaagactgtccggaacgacaactcctcccgctttgggaaattcattaggatccactttggggccactggaaagctggcttctgcagacatagagacctacctgctggagaagtcccgggtgatcttccagctgaaagctgagagaaactaccacatcttctaccagattctgtccaacaagaagccggagttgctggacatgctgctggtcaccaacaatccctacgactacgccttcgtgtctcagggagaggtgtccgtggcctccattgatgactccgaggagctcatggccaccgatagtgcctttgacgtgctgggcttcacttcagaggagaaagctggcgtctacaagctgacgggagccatcatgcactacgggaacatgaagttcaagcagaagcagcgggaggagcaggcggagccagacggcaccgaagatgctgacaagtcggcctacctcatggggctgaactcagctgacctgctcaaggggctgtgccaccctcgggtgaaagtgggcaacgagtatgtcaccaaggggcagagcgtgcagcaggtgtactactccatcggggctctggccaaggcagtgtatgagaagatgttcaactggatggtgacgcgcatcaacgccaccctggagaccaagcagccacgccagtacttcataggagtcctggacatcgctggcttcgagatcttcgacttcaacagctttgagcagctctgcatcaacttcaccaacgagaagctgcagcagttcttcaaccaccacatgttcgtgctggagcaggaggagtacaagaaggagggcattgagtggacattcattgactttggcatggacctgcaggcctgcattgacctcatcgagaagcccatgggcatcatgtccatcctggaggaggagtgcatgttccccaaggccactgacatgaccttcaaggccaagctgtacgacaaccacctgggcaagtccaacaatttccagaagccacgcaacatcaaggggaagcaggaagcccacttctccctgatccactacgccggcactgtggactacaacatcctgggctggctggaaaaaaacaaggatcctctcaacgagactgttgtggccctgtaccagaagtcctccctcaagctcatggccactctcttctcctcctacgcaactgccgatactggggacagtggtaaaagcaaaggaggcaagaaaaagggctcatccttccagacggtgtcggctctccaccgggaaaatctcaacaagctaatgaccaacctgaggaccacccatcctcactttgtgcgttgcatcatccccaatgagcggaaggctccaggggtgatggacaaccccctggtcatgcaccagctgcgctgcaatggcgtgctggagggcatccgcatctgcaggaagggcttccccaaccgcatcctctacggggacttccggcagaggtatcgcatcctgaacccagtggccatccctgagggacagttcattgatagcaggaaggggacagagaagctgctcagctctctggacattgatcacaaccagtacaagtttggccacaccaaggtgttcttcaaggcagggctgcttgggctgctggaggagatgcgggatgagaggctgagccgcatcatcacgcgcatgcaggcccaagcccggggccagctcatgcgcattgagttcaagaagatagtggaacgcagggatgccctgctggtaatccagtggaacattcgggccttcatgggggtcaagaattggccctggatgaagctctacttcaagatcaagccgctgctgaagagcgcagagacggagaaggagatggccaccatgaaggaagagttcgggcgcatcaaagagacgctggagaagtccgaggctcgccgcaaggagctggaggagaagatggtgtccctgctgcaggagaagaatgacctgcagctccaagtgcaggcggaacaagacaacctcaatgatgctgaggagcgctgcgaccagctgatcaaaaacaagattcagctggaggccaaagtaaaggagatgaatgagaggctggaggatgaggaggagatgaacgcggagctcactgccaagaagcgcaagctggaagacgagtgctcagagctcaagaaggacattgatgacctggagctgacactggccaaggtggagaaggagaagcatgcaacagagaacaaggtgaagaacctaacagaggagatggctgggctggatgaaatcatcgctaagctgaccaaggagaagaaagctctacaagaggcccatcagcaggccctggatgaccttcaggttgaggaagacaaggtcaacagcctgtccaagtctaaggtcaagctggagcagcaggtggatgatctggagggatccctagagcaagagaagaaggtgcgcatggacctggagcgagcaaagcggaaactggagggcgacctgaagctgacccaggagagcatcatggacctggaaaatgataaactgcagctggaagaaaagcttaagaagaaggagtttgacattaatcagcagaacagtaagattgaggatgagcaggcgctggcccttcaactacagaagaaactgaaggaaaaccaggcacgcatcgaggagctggaggaggagctggaggccgagcgcaccgccagggctaaggtggagaagctgcgctcagacctgtctcgggagctggaggagatcagcgagcggctggaagaggccggcggggccacgtccgtgcagatcgagatgaacaagaagcgcgaggccgagttccagaagatgcggcgggacctggaggaggccacgctgcagcacgaggccactgccgcggccctgcgcaagaagcacgccgacagcgtggccgagctgggcgagcagatcgacaacctgcagcgggtgaagcagaagctggagaaggagaagagcgagttcaagctggagctggatgacgtcacctccaacatggagcagatcatcaaggccaaggcaaacctggagaaagtgtctcggacgctggaggaccaggccaatgagtaccgcgtgaagctagaagaggcccaacgctccctcaatgatttcaccacccagcgagccaagctgcagaccgagaatggagagttggcccggcagctagaggaaaaggaggcgctaatctcgcagctgacccgggggaagctctcttatacccagcaaatggaggacctcaaaaggcagctggaggaggagggcaaggcgaagaacgccctggcccatgcactgcagtcggcccggcatgactgcgacctgctgcgggagcagtacgaggaggagacagaggccaaggccgagctgcagcgcgtcctgtccaaggccaactcggaggtggcccagtggaggaccaagtatgagacggacgccattcagcggactgaggagctcgaagaggccaaaaagaagctggcccagcggctgcaggatgccgaggaggccgtggaggctgttaatgccaagtgctcctcactggagaagaccaagcaccggctacagaatgagatagaggacttgatggtggacgtagagcgctccaatgctgctgctgcagccctggacaagaagcagagaaactttgacaagatcctggccgagtggaagcagaagtatgaggagtcgcagtctgagctggagtcctcacagaaggaggctcgctccctcagcacagagctcttcaagctcaagaacgcctacgaggagtccctggagcacctagagaccttcaagcgggagaacaagaaccttcaggaggaaatctcggaccttactgagcagctaggagaaggaggaaagaatgtgcatgagctggagaaggtccgcaaacagctggaggtggagaagctggagctgcagtcagccctggaggaggcagaggcctccctggagcacgaggagggcaagatcctccgggcccagctagagttcaaccagatcaaggcagagatcgagcggaagctggcagagaaggacgaggagatggaacaggccaagcgcaaccaccagcgggtggtggactcgctgcagacctccctggatgcagagacacgcagccgcaacgaggtcctgagggtgaagaagaagatggaaggagacctcaatgagatggagatccagctcagccacgccaaccgcatggccgccgaggcccagaagcaagtcaagagcctccagagcttgctgaaggacacccagatccagctggacgatgcggtccgtgccaacgacgacctgaaggagaacatcgccatcgtggagcggcgcaacaacctgctgcaggctgagctggaggagctgcgtgccgtggtggagcagacagagcggtcccggaagctggcggagcaggagctgattgagaccagcgagcgggtgcagctgctgcattcccagaacaccagcctcatcaaccagaagaagaagatggagtcggatctgacccagctccagtcggaagtggaggaggcagtgcaggagtgcagaaacgccgaggagaaggccaagaaggccatcacggatgccgccatgatggcagaggagctgaagaaggagcaggacaccagcgcccacctggagcgcatgaagaagaacatggagcagaccattaaggacctgcagcaccggctggacgaggccgagcagatcgccctcaagggaggcaagaagcagctgcagaagctggaagcgcgggtgcgggagctggagggtgagctggaggccgagcagaagcgcaacgcagagtcggtgaagggcatgaggaagagcgagcggcgcatcaaggagctcacctaccaggtgcggcggacgccagacaccgggagtagatgtggaagtttcttctctggccccactgccccgccctcacagggctcctctcacctcctccttgagatgctgttggtagatttaacgttcttctcacgctctgcagtcagtttgacttgagtctatgagtttttccagcaaatgaagaatctacttctacttcctgaaaactcttctaactagtctttccccaggtttctttctttctttttttttttttttaataactctaagtgctaccatgaagacttcagaacagttcaaagaatccttccaccttcgactgtggggataagagtcaggggaggggaaaagacccggaaatcttccatagaacttctggcacacaaagagaaggccacagagaaagaggaccctagaatgctctaaaacctccacttgcatagctgagagctgtgcccttggcccgttattttcagtgtacctgggaagaaaaggccaaggagacgagggtgtcagtccatttgatagatggataccagaggcacaagaaagaggttacagatacagaaccacagagtgatttgtggacagaagtagaaatggcatcctggcacatacaatgataaagagataggaatgatcgagtgacgttggagccagtgatcccgatgcctgaattctggcccagtacaatatattagaatgtagaataatctggattatgataatacccccttctttctgcattctttttctggtcaagaactactggccaagagaacctatgtaagtccaggttggagctttatccaccatactggagctggaacagacctggtgcttttatattaccacattagggaattccattaggttctgagcccctccccctacttctagctttatgacttcagccttcattgctctgtggatccctgactgacaaccttgcattgcccctttgacctacgatagagtcagagaatcttccccaccacctctttgacctggatcattgcagggaggggcagcaaaggcaaggggagaagagtaaaatgatggaggagggaaaggtgattgcatttgctccccctccaaaccagcttctcccaccctcccacccccagacagaggaagacaaaaagaacctgctgcggctacaggacctggtggacaagctgcaactgaaggtcaaggcctacaagcgccaggccgaggaggcggaggagcaagccaacaccaacctgtccaagttccgcaaggtgcagcatgagctggatgaggcagaggagcgggcggacatcgctgagtcccaggtcaacaagcttcgagccaagagccgtgacattggtgccaagcaaaaaatgcacgatgaggagtgacactgcctcgggaacctcactcttgccaacctgtaataaatatgagtgccaaactctgcctgagcccatctgtccttcctgccagctgtccatcctggatcagggcagtagggggcctgagaggagggaggcccccagcccctgtatcagagctgccagagccaaggcatcccatatccacaaggaaggagaccgaggtgcagaggagtgaggtgttctgcctgacgtggacagctgtgagtcccagttctgctcagtcaaccacacaagggtggagagggagaaatttcaaaagtgaagaaaacaatggcatcaaaatggtgagccagtccaagatgctacgagatagaattttggtgccgaagttgaagccactctccacctaccccacccctgaggctgcaatgattaaaggtgtcctaggacacccattctttctgaaatgaattttccaccaatgccagaaaaggctcagagctggctgagaattaaggtatgggaaaggagatgggagagattccattctagtcagcccctaggaagtaactcccagggagccccctccctgtcttccccaggggtctccccctgcctcctatgattcagcacctcaccgtgagggcatcttgagactctggggccaatcaacactgagcccaaaccaatatgccatgaggaccaagcctgggcattgctcatttcatgttggttctcacacagacacagatggcacaggtgcctgtacagggaaacactgtggtcacatttctgctctctctaagctcctactggggacagtctggcctggatcacacagctgcttgtgggacaggcccggtcctgaccccgttctgcacaaagcaaatccccactccccactgggctttgcagccaggctctgctgaccgcctccttaaccgttcacctggcaccccatctccctgactccccaagtggagcctcttctatccctcctctgagaccatgagaatggactgtgcataaagccctgagaaatgtgagcagtgaccagagaaacacaaaatcctgttggttctagcccaggagaggctgccagttctgatggtgagccaggacacaaggataggagaacaggaagcaggaggcaggaaaaagaccaagagagaggagtggctgccaccaaggaagcagagcgctctgaccagagttcaagatccagggttcgggcaggacttgggagctggggcctgcagctggaaggagcgctccagaagaaggattgtatctcagggcgggaacacacacacatcagcgacaggagatagcacgtcagctgggatggagctgctgagccaggccatgctgggctcctcgggctgggcaggaacgtctggctgcacatctgtctgtctcggcccagcagggctgactcccgggctgtggcagtgtctgctccaaactcccctgggccttcccatagcattcactgtggggagctcttgaccagcttgtctctttcccagcctgtgagtgctaaagggcaggccccccgtcacctctgaggccctggcacccagcacagtgtgcatgggagatgctcaggaaatgtgtgctgaggagctggcaagctgggagggtggacccgcagtggagggaagagttggccattcttttctgagctacaaggaggctcagtacagtatccagaacactcgcttaggtgtcagaagagctgcgttctggccctagctctgtcacaaatgagttcacctcccctggctgggcctgttttctcttatgtgaaatgagggcattggaccagctgataatcaacggctctcccagcattcgcattttgggaaatctctccctcctctgatacctcaggctgccctctccctgcctcctgttcctgtcatag

SEQ ID NO: 168 - DNA, 6290 bp, Homo sapiens
gaggacagatagagagactcctgcggcccagattcttcaggattctccgtgaagggataaccaggggaagcaccaagatgaccgatgcccagatggctgactttggggcagcggcccagtacctccgcaagtcagagaaggagcgtctagaggcccagacccggccctttgacattcgcactgagtgcttcgtgcccgatgacaaggaagagtttgtcaaagccaagattttgtcccgggagggaggcaaggtcattgctgaaaccgagaatgggaagacggtgactgtgaaggaggaccaggtgttgcagcagaacccacccaagttcgacaagattgaggacatggccatgctgaccttcctgcacgagcccgcggtgcttttcaacctcaaggagcgctacgcggcctggatgatatatacctactcgggcctcttctgtgtcactgtcaacccctacaagtggctgccggtgtacaatgccgaagtggtggccgcctacaggggcaagaagaggagtgaggccccgccccacatcttctccatctccgacaacgcctatcagtacatgctgacagatcgggagaaccagtccatcctcatcacgggagaatccggggcggggaagactgtgaacaccaagcgtgtcatccagtactttgccagcattgcagccataggtgaccgtggcaagaaggacaatgccaatgcgaacaagggcaccctggaggaccagatcatccaggccaaccccgctctggaggccttcggcaatgccaagactgtccggaacgacaactcctcccgctttgggaaattcattaggatccactttggggccactggaaagctggcttctgcagacatagagacctacctgctggagaagtcccgggtgatcttccagctgaaagctgagagaaactaccacatcttctaccagattctgtccaacaagaagccggagttgctggacatgctgctggtcaccaacaatccctacgactacgccttcgtgtctcagggagaggtgtccgtggcctccattgatgactccgaggagctcatggccaccgatagtgcctttgacgtgctgggcttcacttcagaggagaaagctggcgtctacaagctgacgggagccatcatgcactacgggaacatgaagttcaagcagaagcagcgggaggagcaggcggagccagacggcaccgaagatgctgacaagtcggcctacctcatggggctgaactcagctgacctgctcaaggggctgtgccaccctcgggtgaaagtgggcaacgagtatgtcaccaaggggcagagcgtgcagcaggtgtactactccatcggggctctggccaaggcagtgtatgagaagatgttcaactggatggtgacgcgcatcaacgccaccctggagaccaagcagccacgccagtacttcataggagtcctggacatcgctggcttcgagatcttcgacttcaacagctttgagcagctctgcatcaacttcaccaacgagaagctgcagcagttcttcaaccaccacatgttcgtgctggagcaggaggagtacaagaaggagggcattgagtggacattcattgactttggcatggacctgcaggcctgcattgacctcatcgagaagcccatgggcatcatgtccatcctggaggaggagtgcatgttccccaaggccactgacatgaccttcaaggccaagctgtacgacaaccacctgggcaagtccaacaatttccagaagccacgcaacatcaaggggaagcaggaagcccacttctccctgatccactacgccggcactgtggactacaacatcctgggctggctggaaaaaaacaaggatcctctcaacgagactgttgtggccctgtaccagaagtcctccctcaagctcatggccactctcttctcctcctacgcaactgccgatactggggacagtggtaaaagcaaaggaggcaagaaaaagggctcatccttccagacggtgtcggctctccaccgggaaaatctcaacaagctaatgaccaacctgaggaccacccatcctcactttgtgcgttgcatcatccccaatgagcggaaggctccaggggtgatggacaaccccctggtcatgcaccagctgcgctgcaatggcgtgctggagggcatccgcatctgcaggaagggcttccccaaccgcatcctctacggggacttccggcagaggtatcgcatcctgaacccagtggccatccctgagggacagttcattgatagcaggaaggggacagagaagctgctcagctctctggacattgatcacaaccagtacaagtttggccacaccaaggtgttcttcaaggcagggctgcttgggctgctggaggagatgcgggatgagaggctgagccgcatcatcacgcgcatgcaggcccaagcccggggccagctcatgcgcattgagttcaagaagatagtggaacgcagggatgccctgctggtaatccagtggaacattcgggccttcatgggggtcaagaattggccctggatgaagctctacttcaagatcaagccgctgctgaagagcgcagagacggagaaggagatggccaccatgaaggaagagttcgggcgcatcaaagagacgctggagaagtccgaggctcgccgcaaggagctggaggagaagatggtgtccctgctgcaggagaagaatgacctgcagctccaagtgcaggcggaacaagacaacctcaatgatgctgaggagcgctgcgaccagctgatcaaaaacaagattcagctggaggccaaagtaaaggagatgaatgagaggctggaggatgaggaggagatgaacgcggagctcactgccaagaagcgcaagctggaagacgagtgctcagagctcaagaaggacattgatgacctggagctgacactggccaaggtggagaaggagaagcatgcaacagagaacaaggtgaagaacctaacagaggagatggctgggctggatgaaatcatcgctaagctgaccaaggagaagaaagctctacaagaggcccatcagcaggccctggatgaccttcaggttgaggaagacaaggtcaacagcctgtccaagtctaaggtcaagctggagcagcaggtggatgatctggagggatccctagagcaagagaagaaggtgcgcatggacctggagcgagcaaagcggaaactggagggcgacctgaagctgacccaggagagcatcatggacctggaaaatgataaactgcagctggaagaaaagcttaagaagaaggagtttgacattaatcagcagaacagtaagattgaggatgagcaggcgctggcccttcaactacagaagaaactgaaggaaaaccaggcacgcatcgaggagctggaggaggagctggaggccgagcgcaccgccagggctaaggtggagaagctgcgctcagacctgtctcgggagctggaggagatcagcgagcggctggaagaggccggcggggccacgtccgtgcagatcgagatgaacaagaagcgcgaggccgagttccagaagatgcggcgggacctggaggaggccacgctgcagcacgaggccactgccgcggccctgcgcaagaagcacgccgacagcgtggccgagctgggcgagcagatcgacaacctgcagcgggtgaagcagaagctggagaaggagaagagcgagttcaagctggagctggatgacgtcacctccaacatggagcagatcatcaaggccaaggcaaacctggagaaagtgtctcggacgctggaggaccaggccaatgagtaccgcgtgaagctagaagaggcccaacgctccctcaatgatttcaccacccagcgagccaagctgcagaccgagaatggagagttggcccggcagctagaggaaaaggaggcgctaatctcgcagctgacccgggggaagctctcttatacccagcaaatggaggacctcaaaaggcagctggaggaggagggcaaggtgaggcccagtggggagggtgggcaggcttgatggcagccctggggcaattcatctcagtgccagaaatggagcctggagctggaaagagtcctctgcaagggaaagaccctccagtctaggttctgccctgcagctaagcgtcatttaatgcctcttttcttattcgtaaggggatggggtgagcagactgggaaactcctcaaacagtgaggtgccacatcagcccacatggtgaataaggctgggcttggttgaagtactacataagaagagaatctagagaatggggcacagggagtccctcccacctcctggtgcccccccccctccccaggcgaagaacgccctggcccatgcactgcagtcggcccggcatgactgcgacctgctgcgggagcagtacgaggaggagacagaggccaaggccgagctgcagcgcgtcctgtccaaggccaactcggaggtggcccagtggaggaccaagtatgagacggacgccattcagcggactgaggagctcgaagaggccaaaaagaagctggcccagcggctgcaggatgccgaggaggccgtggaggctgttaatgccaagtgctcctcactggagaagaccaagcaccggctacagaatgagatagaggacttgatggtggacgtagagcgctccaatgctgctgctgcagccctggacaagaagcagagaaactttgacaagatcctggccgagtggaagcagaagtatgaggagtcgcagtctgagctggagtcctcacagaaggaggctcgctccctcagcacagagctcttcaagctcaagaacgcctacgaggagtccctggagcacctagagaccttcaagcgggagaacaagaaccttcaggaggaaatctcggaccttactgagcagctaggagaaggaggaaagaatgtgcatgagctggagaaggtccgcaaacagctggaggtggagaagctggagctgcagtcagccctggaggaggcagaggcctccctggagcacgaggagggcaagatcctccgggcccagctagagttcaaccagatcaaggcagagatcgagcggaagctggcagagaaggacgaggagatggaacaggccaagcgcaaccaccagcgggtggtggactcgctgcagacctccctggatgcagagacacgcagccgcaacgaggtcctgagggtgaagaagaagatggaaggagacctcaatgagatggagatccagctcagccacgccaaccgcatggccgccgaggcccagaagcaagtcaagagcctccagagcttgctgaaggacacccagatccagctggacgatgcggtccgtgccaacgacgacctgaaggagaacatcgccatcgtggagcggcgcaacaacctgctgcaggctgagctggaggagctgcgtgccgtggtggagcagacagagcggtcccggaagctggcggagcaggagctgattgagaccagcgagcgggtgcagctgctgcattcccagaacaccagcctcatcaaccagaagaagaagatggagtcggatctgacccagctccagtcggaagtggaggaggcagtgcaggagtgcagaaacgccgaggagaaggccaagaaggccatcacggatgccgccatgatggcagaggagctgaagaaggagcaggacaccagcgcccacctggagcgcatgaagaagaacatggagcagaccattaaggacctgcagcaccggctggacgaggccgagcagatcgccctcaagggaggcaagaagcagctgcagaagctggaagcgcgggtgcgggagctggagggtgagctggaggccgagcagaagcgcaacgcagagtcggtgaagggcatgaggaagagcgagcggcgcatcaaggagctcacctaccagacagaggaagacaaaaagaacctgctgcggctacaggacctggtggacaagctgcaactgaaggtcaaggcctacaagcgccaggccgaggaggcggaggagcaagccaacaccaacctgtccaagttccgcaaggtgcagcatgagctggatgaggcagaggagcgggcggacatcgctgagtcccaggtcaacaagcttcgagccaagagccgtgacattggtgccaagcaaaaaatgcacgatgaggagtgacactgcctcgggaacctcactcttgccaacctgtaataaatatgagtgccaaactc

SEQ ID NO: 169 - DNA, 6057 bp, Homo sapiens
gaggacagatagagagactcctgcggcccagattcttcaggattctccgtgaagggataaccaggggaagcaccaagatgaccgatgcccagatggctgactttggggcagcggcccagtacctccgcaagtcagagaaggagcgtctagaggcccagacccggccctttgacattcgcactgagtgcttcgtgcccgatgacaaggaagagtttgtcaaagccaagattttgtcccgggagggaggcaaggtcattgctgaaaccgagaatgggaagacggtgactgtgaaggaggaccaggtgttgcagcagaacccacccaagttcgacaagattgaggacatggccatgctgaccttcctgcacgagcccgcggtgcttttcaacctcaaggagcgctacgcggcctggatgatatatacctactcgggcctcttctgtgtcactgtcaacccctacaagtggctgccggtgtacaatgccgaagtggtggccgcctacaggggcaagaagaggagtgaggccccgccccacatcttctccatctccgacaacgcctatcagtacatgctgacagatcgggagaaccagtccatcctcatcacgggagaatccggggcggggaagactgtgaacaccaagcgtgtcatccagtactttgccagcattgcagccataggtgaccgtggcaagaaggacaatgccaatgcgaacaagggcaccctggaggaccagatcatccaggccaaccccgctctggaggccttcggcaatgccaagactgtccggaacgacaactcctcccgctttgggaaattcattaggatccactttggggccactggaaagctggcttctgcagacatagagacctacctgctggagaagtcccgggtgatcttccagctgaaagctgagagaaactaccacatcttctaccagattctgtccaacaagaagccggagttgctggacatgctgctggtcaccaacaatccctacgactacgccttcgtgtctcagggagaggtgtccgtggcctccattgatgactccgaggagctcatggccaccgatagtgcctttgacgtgctgggcttcacttcagaggagaaagctggcgtctacaagctgacgggagccatcatgcactacgggaacatgaagttcaagcagaagcagcgggaggagcaggcggagccagacggcaccgaagatgctgacaagtcggcctacctcatggggctgaactcagctgacctgctcaaggggctgtgccaccctcgggtgaaagtgggcaacgagtatgtcaccaaggggcagagcgtgcagcaggtgtactactccatcggggctctggccaaggcagtgtatgagaagatgttcaactggatggtgacgcgcatcaacgccaccctggagaccaagcagccacgccagtacttcataggagtcctggacatcgctggcttcgagatcttcgacttcaacagctttgagcagctctgcatcaacttcaccaacgagaagctgcagcagttcttcaaccaccacatgttcgtgctggagcaggaggagtacaagaaggagggcattgagtggacattcattgactttggcatggacctgcaggcctgcattgacctcatcgagaagcccatgggcatcatgtccatcctggaggaggagtgcatgttccccaaggccactgacatgaccttcaaggccaagctgtacgacaaccacctgggcaagtccaacaatttccagaagccacgcaacatcaaggggaagcaggaagcccacttctccctgatccactacgccggcactgtggactacaacatcctgggctggctggaaaaaaacaaggatcctctcaacgagactgttgtggccctgtaccagaagtcctccctcaagctcatggccactctcttctcctcctacgcaactgccgatactggggacagtggtaaaagcaaaggaggcaagaaaaagggctcatccttccagacggtgtcggctctccaccgggaaaatctcaacaagctaatgaccaacctgaggaccacccatcctcactttgtgcgttgcatcatccccaatgagcggaaggctccaggggtgatggacaaccccctggtcatgcaccagctgcgctgcaatggcgtgctggagggcatccgcatctgcaggaagggcttccccaaccgcatcctctacggggacttccggcagaggtatcgcatcctgaacccagtggccatccctgagggacagttcattgatagcaggaaggggacagagaagctgctcagctctctggacattgatcacaaccagtacaagtttggccacaccaaggtgttcttcaaggcagggctgcttgggctgctggaggagatgcgggatgagaggctgagccgcatcatcacgcgcatgcaggcccaagcccggggccagctcatgcgcattgagttcaagaagatagtggaacgcagggatgccctgctggtaatccagtggaacattcgggccttcatgggggtcaagaattggccctggatgaagctctacttcaagatcaagccgctgctgaagagcgcagagacggagaaggagatggccaccatgaaggaagagttcgggcgcatcaaagagacgctggagaagtccgaggctcgccgcaaggagctggaggagaagatggtgtccctgctgcaggagaagaatgacctgcagctccaagtgcaggcggaacaagacaacctcaatgatgctgaggagcgctgcgaccagctgatcaaaaacaagattcagctggaggccaaagtaaaggagatgaatgagaggctggaggatgaggaggagatgaacgcggagctcactgccaagaagcgcaagctggaagacgagtgctcagagctcaagaaggacattgatgacctggagctgacactggccaaggtggagaaggagaagcatgcaacagagaacaaggtgaagaacctaacagaggagatggctgggctggatgaaatcatcgctaagctgaccaaggagaagaaagctctacaagaggcccatcagcaggccctggatgaccttcaggttgaggaagacaaggtcaacagcctgtccaagtctaaggtcaagctggagcagcaggtggatgatctggagggatccctagagcaagagaagaaggtgcgcatggacctggagcgagcaaagcggaaactggagggcgacctgaagctgacccaggagagcatcatggacctggaaaatgataaactgcagctggaagaaaagcttaagaagaaggagtttgacattaatcagcagaacagtaagattgaggatgagcaggcgctggcccttcaactacagaagaaactgaaggaaaaccaggcacgcatcgaggagctggaggaggagctggaggccgagcgcaccgccagggctaaggtggagaagctgcgctcagacctgtctcgggagctggaggagatcagcgagcggctggaagaggccggcggggccacgtccgtgcagatcgagatgaacaagaagcgcgaggccgagttccagaagatgcggcgggacctggaggaggccacgctgcagcacgaggccactgccgcggccctgcgcaagaagcacgccgacagcgtggccgagctgggcgagcagatcgacaacctgcagcgggtgaagcagaagctggagaaggagaagagcgagttcaagctggagctggatgacgtcacctccaacatggagcagatcatcaaggccaaggcaaacctggagaaagtgtctcggacgctggaggaccaggccaatgagtaccgcgtgaagctagaagaggcccaacgctccctcaatgatttcaccacccagcgagccaagctgcagaccgagaatggagagttggcccggcagctagaggaaaaggaggcgctaatctcgcagctgacccgggggaagctctcttatacccagcaaatggaggacctcaaaaggcagctggaggaggagggcaaggcgaagaacgccctggcccatgcactgcagtcggcccggcatgactgcgacctgctgcgggagcagtacgaggaggagacagaggccaaggccgagctgcagcgcgtcctgtccaaggccaactcggaggtggcccagtggaggaccaagtatgagacggacgccattcagcggactgaggagctcgaagaggccaaaaagaagctggcccagcggctgcaggatgccgaggaggccgtggaggctgttaatgccaagtgctcctcactggagaagaccaagcaccggctacagaatgagatagaggacttgatggtggacgtagagcgctccaatgctgctgctgcagccctggacaagaagcagagaaactttgacaagatcctggccgagtggaagcagaagtatgaggagtcgcagtctgagctggagtcctcacagaaggaggctcgctccctcagcacagagctcttcaagctcaagaacgcctacgaggagtccctggagcacctagagaccttcaagcgggagaacaagaaccttcagggtgtgctgggggtccaagaggccagagatgagttggtgggagggagggccatgcaggggcagggggaacataggctttgagctttctggccctctggtccccagaggaaatctcggaccttactgagcagctaggagaaggaggaaagaatgtgcatgagctggagaaggtccgcaaacagctggaggtggagaagctggagctgcagtcagccctggaggaggcagaggcctccctggagcacgaggagggcaagatcctccgggcccagctagagttcaaccagatcaaggcagagatcgagcggaagctggcagagaaggacgaggagatggaacaggccaagcgcaaccaccagcgggtggtggactcgctgcagacctccctggatgcagagacacgcagccgcaacgaggtcctgagggtgaagaagaagatggaaggagacctcaatgagatggagatccagctcagccacgccaaccgcatggccgccgaggcccagaagcaagtcaagagcctccagagcttgctgaaggacacccagatccagctggacgatgcggtccgtgccaacgacgacctgaaggagaacatcgccatcgtggagcggcgcaacaacctgctgcaggctgagctggaggagctgcgtgccgtggtggagcagacagagcggtcccggaagctggcggagcaggagctgattgagaccagcgagcgggtgcagctgctgcattcccagaacaccagcctcatcaaccagaagaagaagatggagtcggatctgacccagctccagtcggaagtggaggaggcagtgcaggagtgcagaaacgccgaggagaaggccaagaaggccatcacggatgccgccatgatggcagaggagctgaagaaggagcaggacaccagcgcccacctggagcgcatgaagaagaacatggagcagaccattaaggacctgcagcaccggctggacgaggccgagcagatcgccctcaagggaggcaagaagcagctgcagaagctggaagcgcgggtgcgggagctggagggtgagctggaggccgagcagaagcgcaacgcagagtcggtgaagggcatgaggaagagcgagcggcgcatcaaggagctcacctaccagacagaggaagacaaaaagaacctgctgcggctacaggacctggtggacaagctgcaactgaaggtcaaggcctacaagcgccaggccgaggaggcggaggagcaagccaacaccaacctgtccaagttccgcaaggtgcagcatgagctggatgaggcagaggagcgggcggacatcgctgagtcccaggtcaacaagcttcgagccaagagccgtgacattggtgccaagcaaaaaatgcacgatgaggagtgacactgcctcgggaacctcactcttgccaacctgtaataaatatgagtgccaaactc

SEQ ID NO: 170 - DNA, 6177 bp, Homo sapiens
gaggacagatagagagactcctgcggcccagattcttcaggattctccgtgaagggataaccaggggaagcaccaagatgaccgatgcccagatggctgactttggggcagcggcccagtacctccgcaagtcagagaaggagcgtctagaggcccagacccggccctttgacattcgcactgagtgcttcgtgcccgatgacaaggaagagtttgtcaaagccaagattttgtcccgggagggaggcaaggtcattgctgaaaccgagaatgggaagacggtgactgtgaaggaggaccaggtgttgcagcagaacccacccaagttcgacaagattgaggacatggccatgctgaccttcctgcacgagcccgcggtgcttttcaacctcaaggagcgctacgcggcctggatgatatatacctactcgggcctcttctgtgtcactgtcaacccctacaagtggctgccggtgtacaatgccgaagtggtggccgcctacaggggcaagaagaggagtgaggccccgccccacatcttctccatctccgacaacgcctatcagtacatgctgacagatcgggagaaccagtccatcctcatcacgggagaatccggggcggggaagactgtgaacaccaagcgtgtcatccagtactttgccagcattgcagccataggtgaccgtggcaagaaggacaatgccaatgcgaacaagggcaccctggaggaccagatcatccaggccaaccccgctctggaggccttcggcaatgccaagactgtccggaacgacaactcctcccgctttgggaaattcattaggatccactttggggccactggaaagctggcttctgcagacatagagacctacctgctggagaagtcccgggtgatcttccagctgaaagctgagagaaactaccacatcttctaccagattctgtccaacaagaagccggagttgctggacatgctgctggtcaccaacaatccctacgactacgccttcgtgtctcagggagaggtgtccgtggcctccattgatgactccgaggagctcatggccaccgatagtgcctttgacgtgctgggcttcacttcagaggagaaagctggcgtctacaagctgacgggagccatcatgcactacgggaacatgaagttcaagcagaagcagcgggaggagcaggcggagccagacggcaccgaagatgctgacaagtcggcctacctcatggggctgaactcagctgacctgctcaaggggctgtgccaccctcgggtgaaagtgggcaacgagtatgtcaccaaggggcagagcgtgcagcaggtgtactactccatcggggctctggccaaggcagtgtatgagaagatgttcaactggatggtgacgcgcatcaacgccaccctggagaccaagcagccacgccagtacttcataggagtcctggacatcgctggcttcgagatcttcgacttcaacagctttgagcagctctgcatcaacttcaccaacgagaagctgcagcagttcttcaaccaccacatgttcgtgctggagcaggaggagtacaagaaggagggcattgagtggacattcattgactttggcatggacctgcaggcctgcattgacctcatcgagaagcccatgggcatcatgtccatcctggaggaggagtgcatgttccccaaggccactgacatgaccttcaaggccaagctgtacgacaaccacctgggcaagtccaacaatttccagaagccacgcaacatcaaggggaagcaggaagcccacttctccctgatccactacgccggcactgtggactacaacatcctgggctggctggaaaaaaacaaggatcctctcaacgagactgttgtggccctgtaccagaagtcctccctcaagctcatggccactctcttctcctcctacgcaactgccgatactggggacagtggtaaaagcaaaggaggcaagaaaaagggctcatccttccagacggtgtcggctctccaccgggaaaatctcaacaagctaatgaccaacctgaggaccacccatcctcactttgtgcgttgcatcatccccaatgagcggaaggctccaggggtgatggacaaccccctggtcatgcaccagctgcgctgcaatggcgtgctggagggcatccgcatctgcaggaagggcttccccaaccgcatcctctacggggacttccggcagaggtatcgcatcctgaacccagtggccatccctgagggacagttcattgatagcaggaaggggacagagaagctgctcagctctctggacattgatcacaaccagtacaagtttggccacaccaaggtgttcttcaaggcagggctgcttgggctgctggaggagatgcgggatgagaggctgagccgcatcatcacgcgcatgcaggcccaagcccggggccagctcatgcgcattgagttcaagaagatagtggaacgcagggatgccctgctggtaatccagtggaacattcgggccttcatgggggtcaagaattggccctggatgaagctctacttcaagatcaagccgctgctgaagagcgcagagacggagaaggagatggccaccatgaaggaagagttcgggcgcatcaaagagacgctggagaagtccgaggctcgccgcaaggagctggaggagaagatggtgtccctgctgcaggagaagaatgacctgcagctccaagtgcaggcggaacaagacaacctcaatgatgctgaggagcgctgcgaccagctgatcaaaaacaagattcagctggaggccaaagtaaaggagatgaatgagaggctggaggatgaggaggagatgaacgcggagctcactgccaagaagcgcaagctggaagacgagtgctcagagctcaagaaggacattgatgacctggagctgacactggccaaggtggagaaggagaagcatgcaacagagaacaaggtgaagaacctaacagaggagatggctgggctggatgaaatcatcgctaagctgaccaaggagaagaaagctctacaagaggcccatcagcaggccctggatgaccttcaggttgaggaagacaaggtcaacagcctgtccaagtctaaggtcaagctggagcagcaggtggatgatctggagggatccctagagcaagagaagaaggtgcgcatggacctggagcgagcaaagcggaaactggagggcgacctgaagctgacccaggagagcatcatggacctggaaaatgataaactgcagctggaagaaaagcttaagaagaaggagtttgacattaatcagcagaacagtaagattgaggatgagcaggcgctggcccttcaactacagaagaaactgaaggaaaaccaggcacgcatcgaggagctggaggaggagctggaggccgagcgcaccgccagggctaaggtggagaagctgcgctcagacctgtctcgggagctggaggagatcagcgagcggctggaagaggccggcggggccacgtccgtgcagatcgagatgaacaagaagcgcgaggccgagttccagaagatgcggcgggacctggaggaggccacgctgcagcacgaggccactgccgcggccctgcgcaagaagcacgccgacagcgtggccgagctgggcgagcagatcgacaacctgcagcgggtgaagcagaagctggagaaggagaagagcgagttcaagctggagctggatgacgtcacctccaacatggagcagatcatcaaggccaaggcaaacctggagaaagtgtctcggacgctggaggaccaggccaatgagtaccgcgtgaagctagaagaggcccaacgctccctcaatgatttcaccacccagcgagccaagctgcagaccgagaatggagagttggcccggcagctagaggaaaaggaggcgctaatctcgcagctgacccgggggaagctctcttatacccagcaaatggaggacctcaaaaggcagctggaggaggagggcaaggcgaagaacgccctggcccatgcactgcagtcggcccggcatgactgcgacctgctgcgggagcagtacgaggaggagacagaggccaaggccgagctgcagcgcgtcctgtccaaggccaactcggaggtggcccagtggaggaccaagtatgagacggacgccattcagcggactgaggagctcgaagaggccaaaaagaagctggcccagcggctgcaggatgccgaggaggccgtggaggctgttaatgccaagtgctcctcactggagaagaccaagcaccggctacagaatgagatagaggacttgatggtggacgtagagcgctccaatgctgctgctgcagccctggacaagaagcagagaaactttgacaagatcctggccgagtggaagcagaagtatgaggagtcgcagtctgagctggagtcctcacagaaggaggctcgctccctcagcacagagctcttcaagctcaagaacgcctacgaggagtccctggagcacctagagaccttcaagcgggagaacaagaaccttcaggaggaaatctcggaccttactgagcagctaggagaaggaggaaagaatgtgcatgagctggagaaggtccgcaaacagctggaggtggagaagctggagctgcagtcagccctggaggaggcagaggcctccctggagcacgaggagggcaagatcctccgggcccagctagagttcaaccagatcaaggcagagatcgagcggaagctggcagagaaggacgaggagatggaacaggccaagcgcaaccaccagcgggtggtggactcgctgcagacctccctggatgcagagacacgcagccgcaacgaggtcctgagggtgaagaagaagatggaaggagacctcaatgagatggagatccagctcagccacgccaaccgcatggccgccgaggcccagaagcaagtcaagagcctccagagcttgctgaaggacacccagatccagctggacgatgcggtccgtgccaacgacgacctgaaggagaacatcgccatcgtggagcggcgcaacaacctgctgcaggctgagctggaggagctgcgtgccgtggtggagcagacagagcggtcccggaagctggcggagcaggagctgattgagaccagcgagcgggtgcagctgctgcattcccagaacaccagcctcatcaaccagaagaagaagatggagtcggatctgacccagctccagtcggaagtggaggaggcagtgcaggagtgcagaaacgccgaggagaaggccaagaaggccatcacggatgccgccatgatggcagaggagctgaagaaggagcaggacaccagcgcccacctggagcgcatgaagaagaacatggagcagaccattaaggacctgcagcaccggctggacgaggccgagcagatcgccctcaagggaggcaagaagcagctgcagaagctggaagcgcgggtgcgggagctggagggtgagctggaggccgagcagaagcgcaacgcagagtcggtgaagggcatgaggaagagcgagcggcgcatcaaggagctcacctaccaggtgcggcggacgccagacaccgggagtagatgtggaagtttcttctctggccccactgccccgccctcacagggctcctctcacctcctccttgagatgctgttggtagatttaacgttcttctcacgctctgcagtcagtttgacttgagtctatgagtttttccagcaaatgaagaatctacttctacttcctgaaaactcttctaactagtctttccccagacagaggaagacaaaaagaacctgctgcggctacaggacctggtggacaagctgcaactgaaggtcaaggcctacaagcgccaggccgaggaggcggaggagcaagccaacaccaacctgtccaagttccgcaaggtgcagcatgagctggatgaggcagaggagcgggcggacatcgctgagtcccaggtcaacaagcttcgagccaagagccgtgacattggtgccaagcaaaaaatgcacgatgaggagtgacactgcctcgggaacctcactcttgccaacctgtaataaatatgagtgccaaactc

SEQ ID NO: 171 - DNA, 9119 bp, Homo sapiens
gaggacagatagagagactcctgcggcccagattcttcaggattctccgtgaagggataaccaggggaagcaccaagatgaccgatgcccagatggctgactttggggcagcggcccagtacctccgcaagtcagagaaggagcgtctagaggcccagacccggccctttgacattcgcactgagtgcttcgtgcccgatgacaaggaagagtttgtcaaagccaagattttgtcccgggagggaggcaaggtcattgctgaaaccgagaatgggaagacggtgactgtgaaggaggaccaggtgttgcagcagaacccacccaagttcgacaagattgaggacatggccatgctgaccttcctgcacgagcccgcggtgcttttcaacctcaaggagcgctacgcggcctggatgatatatacctactcgggcctcttctgtgtcactgtcaacccctacaagtggctgccggtgtacaatgccgaagtggtggccgcctacaggggcaagaagaggagtgaggccccgccccacatcttctccatctccgacaacgcctatcagtacatgctgacagatcgggagaaccagtccatcctcatcacgggagaatccggggcggggaagactgtgaacaccaagcgtgtcatccagtactttgccagcattgcagccataggtgaccgtggcaagaaggacaatgccaatgcgaacaagggcaccctggaggaccagatcatccaggccaaccccgctctggaggccttcggcaatgccaagactgtccggaacgacaactcctcccgctttgggaaattcattaggatccactttggggccactggaaagctggcttctgcagacatagagacctacctgctggagaagtcccgggtgatcttccagctgaaagctgagagaaactaccacatcttctaccagattctgtccaacaagaagccggagttgctggacatgctgctggtcaccaacaatccctacgactacgccttcgtgtctcagggagaggtgtccgtggcctccattgatgactccgaggagctcatggccaccgatagtgcctttgacgtgctgggcttcacttcagaggagaaagctggcgtctacaagctgacgggagccatcatgcactacgggaacatgaagttcaagcagaagcagcgggaggagcaggcggagccagacggcaccgaagatgctgacaagtcggcctacctcatggggctgaactcagctgacctgctcaaggggctgtgccaccctcgggtgaaagtgggcaacgagtatgtcaccaaggggcagagcgtgcagcaggtgtactactccatcggggctctggccaaggcagtgtatgagaagatgttcaactggatggtgacgcgcatcaacgccaccctggagaccaagcagccacgccagtacttcataggagtcctggacatcgctggcttcgagatcttcgacttcaacagctttgagcagctctgcatcaacttcaccaacgagaagctgcagcagttcttcaaccaccacatgttcgtgctggagcaggaggagtacaagaaggagggcattgagtggacattcattgactttggcatggacctgcaggcctgcattgacctcatcgagaagcccatgggcatcatgtccatcctggaggaggagtgcatgttccccaaggccactgacatgaccttcaaggccaagctgtacgacaaccacctgggcaagtccaacaatttccagaagccacgcaacatcaaggggaagcaggaagcccacttctccctgatccactacgccggcactgtggactacaacatcctgggctggctggaaaaaaacaaggatcctctcaacgagactgttgtggccctgtaccagaagtcctccctcaagctcatggccactctcttctcctcctacgcaactgccgatactggggacagtggtaaaagcaaaggaggcaagaaaaagggctcatccttccagacggtgtcggctctccaccgggaaaatctcaacaagctaatgaccaacctgaggaccacccatcctcactttgtgcgttgcatcatccccaatgagcggaaggctccaggggtgatggacaaccccctggtcatgcaccagctgcgctgcaatggcgtgctggagggcatccgcatctgcaggaagggcttccccaaccgcatcctctacggggacttccggcagaggtatcgcatcctgaacccagtggccatccctgagggacagttcattgatagcaggaaggggacagagaagctgctcagctctctggacattgatcacaaccagtacaagtttggccacaccaaggtgttcttcaaggcagggctgcttgggctgctggaggagatgcgggatgagaggctgagccgcatcatcacgcgcatgcaggcccaagcccggggccagctcatgcgcattgagttcaagaagatagtggaacgcagggatgccctgctggtaatccagtggaacattcgggccttcatgggggtcaagaattggccctggatgaagctctacttcaagatcaagccgctgctgaagagcgcagagacggagaaggagatggccaccatgaaggaagagttcgggcgcatcaaagagacgctggagaagtccgaggctcgccgcaaggagctggaggagaagatggtgtccctgctgcaggagaagaatgacctgcagctccaagtgcaggcggaacaagacaacctcaatgatgctgaggagcgctgcgaccagctgatcaaaaacaagattcagctggaggccaaagtaaaggagatgaatgagaggctggaggatgaggaggagatgaacgcggagctcactgccaagaagcgcaagctggaagacgagtgctcagagctcaagaaggacattgatgacctggagctgacactggccaaggtggagaaggagaagcatgcaacagagaacaaggtgaagaacctaacagaggagatggctgggctggatgaaatcatcgctaagctgaccaaggagaagaaagctctacaagaggcccatcagcaggccctggatgaccttcaggttgaggaagacaaggtcaacagcctgtccaagtctaaggtcaagctggagcagcaggtggatgatctggagggatccctagagcaagagaagaaggtgcgcatggacctggagcgagcaaagcggaaactggagggcgacctgaagctgacccaggagagcatcatggacctggaaaatgataaactgcagctggaagaaaagcttaagaagaaggagtttgacattaatcagcagaacagtaagattgaggatgagcaggcgctggcccttcaactacagaagaaactgaaggaaaaccaggcacgcatcgaggagctggaggaggagctggaggccgagcgcaccgccagggctaaggtggagaagctgcgctcagacctgtctcgggagctggaggagatcagcgagcggctggaagaggccggcggggccacgtccgtgcagatcgagatgaacaagaagcgcgaggccgagttccagaagatgcggcgggacctggaggaggccacgctgcagcacgaggccactgccgcggccctgcgcaagaagcacgccgacagcgtggccgagctgggcgagcagatcgacaacctgcagcgggtgaagcagaagctggagaaggagaagagcgagttcaagctggagctggatgacgtcacctccaacatggagcagatcatcaaggccaaggcaaacctggagaaagtgtctcggacgctggaggaccaggccaatgagtaccgcgtgaagctagaagaggcccaacgctccctcaatgatttcaccacccagcgagccaagctgcagaccgagaatggagagttggcccggcagctagaggaaaaggaggcgctaatctcgcagctgacccgggggaagctctcttatacccagcaaatggaggacctcaaaaggcagctggaggaggagggcaaggcgaagaacgccctggcccatgcactgcagtcggcccggcatgactgcgacctgctgcgggagcagtacgaggaggagacagaggccaaggccgagctgcagcgcgtcctgtccaaggccaactcggaggtggcccagtggaggaccaagtatgagacggacgccattcagcggactgaggagctcgaagaggccaaaaagaagctggcccagcggctgcaggatgccgaggaggccgtggaggctgttaatgccaagtgctcctcactggagaagaccaagcaccggctacagaatgagatagaggacttgatggtggacgtagagcgctccaatgctgctgctgcagccctggacaagaagcagagaaactttgacaagatcctggccgagtggaagcagaagtatgaggagtcgcagtctgagctggagtcctcacagaaggaggctcgctccctcagcacagagctcttcaagctcaagaacgcctacgaggagtccctggagcacctagagaccttcaagcgggagaacaagaaccttcaggaggaaatctcggaccttactgagcagctaggagaaggaggaaagaatgtgcatgagctggagaaggtccgcaaacagctggaggtggagaagctggagctgcagtcagccctggaggaggcagaggcctccctggagcacgaggagggcaagatcctccgggcccagctagagttcaaccagatcaaggcagagatcgagcggaagctggcagagaaggacgaggagatggaacaggccaagcgcaaccaccagcgggtggtggactcgctgcagacctccctggatgcagagacacgcagccgcaacgaggtcctgagggtgaagaagaagatggaaggagacctcaatgagatggagatccagctcagccacgccaaccgcatggccgccgaggcccagaagcaagtcaagagcctccagagcttgctgaaggacacccagatccagctggacgatgcggtccgtgccaacgacgacctgaaggagaacatcgccatcgtggagcggcgcaacaacctgctgcaggctgagctggaggagctgcgtgccgtggtggagcagacagagcggtcccggaagctggcggagcaggagctgattgagaccagcgagcgggtgcagctgctgcattcccagaacaccagcctcatcaaccagaagaagaagatggagtcggatctgacccagctccagtcggaagtggaggaggcagtgcaggagtgcagaaacgccgaggagaaggccaagaaggccatcacggatgtaagtgaccgcccaccttccgcctcccctaaagacagaaacaaggccttgggtccaggccaggccactgtgctgtaacaccaagccaactctgcagttctgtggatttgagggcctgatgggagaaaggagatccttggggggcaaaaggccccggcccctggcccatgttccttgccacctctctcctgcacacaggccgccatgatggcagaggagctgaagaaggagcaggacaccagcgcccacctggagcgcatgaagaagaacatggagcagaccattaaggacctgcagcaccggctggacgaggccgagcagatcgccctcaagggaggcaagaagcagctgcagaagctggaagcgcgggtgcgggagctggagggtgagctggaggccgagcagaagcgcaacgcagagtcggtgaagggcatgaggaagagcgagcggcgcatcaaggagctcacctaccaggtgcggcggacgccagacaccgggagtagatgtggaagtttcttctctggccccactgccccgccctcacagggctcctctcacctcctccttgagatgctgttggtagatttaacgttcttctcacgctctgcagtcagtttgacttgagtctatgagtttttccagcaaatgaagaatctacttctacttcctgaaaactcttctaactagtctttccccaggtttctttctttctttttttttttttttaataactctaagtgctaccatgaagacttcagaacagttcaaagaatccttccaccttcgactgtggggataagagtcaggggaggggaaaagacccggaaatcttccatagaacttctggcacacaaagagaaggccacagagaaagaggaccctagaatgctctaaaacctccacttgcatagctgagagctgtgcccttggcccgttattttcagtgtacctgggaagaaaaggccaaggagacgagggtgtcagtccatttgatagatggataccagaggcacaagaaagaggttacagatacagaaccacagagtgatttgtggacagaagtagaaatggcatcctggcacatacaatgataaagagataggaatgatcgagtgacgttggagccagtgatcccgatgcctgaattctggcccagtacaatatattagaatgtagaataatctggattatgataatacccccttctttctgcattctttttctggtcaagaactactggccaagagaacctatgtaagtccaggttggagctttatccaccatactggagctggaacagacctggtgcttttatattaccacattagggaattccattaggttctgagcccctccccctacttctagctttatgacttcagccttcattgctctgtggatccctgactgacaaccttgcattgcccctttgacctacgatagagtcagagaatcttccccaccacctctttgacctggatcattgcagggaggggcagcaaaggcaaggggagaagagtaaaatgatggaggagggaaaggtgattgcatttgctccccctccaaaccagcttctcccaccctcccacccccagacagaggaagacaaaaagaacctgctgcggctacaggacctggtggacaagctgcaactgaaggtcaaggcctacaagcgccaggccgaggaggcggaggagcaagccaacaccaacctgtccaagttccgcaaggtgcagcatgagctggatgaggcagaggagcgggcggacatcgctgagtcccaggtcaacaagcttcgagccaagagccgtgacattggtgccaagcaaaaaatgcacgatgaggagtgacactgcctcgggaacctcactcttgccaacctgtaataaatatgagtgccaaactctgcctgagcccatctgtccttcctgccagctgtccatcctggatcagggcagtagggggcctgagaggagggaggcccccagcccctgtatcagagctgccagagccaaggcatcccatatccacaaggaaggagaccgaggtgcagaggagtgaggtgttctgcctgacgtggacagctgtgagtcccagttctgctcagtcaaccacacaagggtggagagggagaaatttcaaaagtgaagaaaacaatggcatcaaaatggtgagccagtccaagatgctacgagatagaattttggtgccgaagttgaagccactctccacctaccccacccctgaggctgcaatgattaaaggtgtcctaggacacccattctttctgaaatgaattttccaccaatgccagaaaaggctcagagctggctgagaattaaggtatgggaaaggagatgggagagattccattctagtcagcccctaggaagtaactcccagggagccccctccctgtcttccccaggggtctccccctgcctcctatgattcagcacctcaccgtgagggcatcttgagactctggggccaatcaacactgagcccaaaccaatatgccatgaggaccaagcctgggcattgctcatttcatgttggttctcacacagacacagatggcacaggtgcctgtacagggaaacactgtggtcacatttctgctctctctaagctcctactggggacagtctggcctggatcacacagctgcttgtgggacaggcccggtcctgaccccgttctgcacaaagcaaatccccactccccactgggctttgcagccaggctctgctgaccgcctccttaaccgttcacctggcaccccatctccctgactccccaagtggagcctcttctatccctcctctgagaccatgagaatggactgtgcataaagccctgagaaatgtgagcagtgaccagagaaacacaaaatcctgttggttctagcccaggagaggctgccagttctgatggtgagccaggacacaaggataggagaacaggaagcaggaggcaggaaaaagaccaagagagaggagtggctgccaccaaggaagcagagcgctctgaccagagttcaagatccagggttcgggcaggacttgggagctggggcctgcagctggaaggagcgctccagaagaaggattgtatctcagggcgggaacacacacacatcagcgacaggagatagcacgtcagctgggatggagctgctgagccaggccatgctgggctcctcgggctgggcaggaacgtctggctgcacatctgtctgtctcggcccagcagggctgactcccgggctgtggcagtgtctgctccaaactcccctgggccttcccatagcattcactgtggggagctcttgaccagcttgtctctttcccagcctgtgagtgctaaagggcaggccccccgtcacctctgaggccctggcacccagcacagtgtgcatgggagatgctcaggaaatgtgtgctgaggagctggcaagctgggagggtggacccgcagtggagggaagagttggccattcttttctgagctacaaggaggctcagtacagtatccagaacactcgcttaggtgtcagaagagctgcgttctggccctagctctgtcacaaatgagttcacctcccctggctgggcctgttttctcttatgtgaaatgagggcattggaccagctgataatcaacggctctcccagcattcgcattttgggaaatctctccctcctctgatacctcaggctgccctctccctgcctcctgttcctgtcatag

SEQ ID NO: 172 - DNA, 4427 bp, Homo sapiens
gtaccagcacagcgccccttcagcaggccagcgctactggctccagattccttttcctgtcagggtatgggactgtggaagcctgggagtgtgctcagtgattctctctttgcctcttcaccctgccctcagcccatgggcatcatgtccatcctggaggaggagtgcatgttccccaaggccactgacatgaccttcaaggccaagctgtacgacaaccacctgggcaagtccaacaatttccagaagccacgcaacatcaaggggaagcaggaagcccacttctccctgatccactacgccggcactgtggactacaacatcctgggctggctggaaaaaaacaaggatcctctcaacgagactgttgtggccctgtaccagaagtcctccctcaagctcatggccactctcttctcctcctacgcaactgccgatactggggacagtggtaaaagcaaaggaggcaagaaaaagggctcatccttccagacggtgtcggctctccaccgggaaaatctcaacaagctaatgaccaacctgaggaccacccatcctcactttgtgcgttgcatcatccccaatgagcggaaggctccaggggtgatggacaaccccctggtcatgcaccagctgcgctgcaatggcgtgctggagggcatccgcatctgcaggaagggcttccccaaccgcatcctctacggggacttccggcagaggtatcgcatcctgaacccagtggccatccctgagggacagttcattgatagcaggaaggggacagagaagctgctcagctctctggacattgatcacaaccagtacaagtttggccacaccaaggtgttcttcaaggcagggctgcttgggctgctggaggagatgcgggatgagaggctgagccgcatcatcacgcgcatgcaggcccaagcccggggccagctcatgcgcattgagttcaagaagatagtggaacgcagggatgccctgctggtaatccagtggaacattcgggccttcatgggggtcaagaattggccctggatgaagctctacttcaagatcaagccgctgctgaagagcgcagagacggagaaggagatggccaccatgaaggaagagttcgggcgcatcaaagagacgctggagaagtccgaggctcgccgcaaggagctggaggagaagatggtgtccctgctgcaggagaagaatgacctgcagctccaagtgcaggcggaacaagacaacctcaatgatgctgaggagcgctgcgaccagctgatcaaaaacaagattcagctggaggccaaagtaaaggagatgaatgagaggctggaggatgaggaggagatgaacgcggagctcactgccaagaagcgcaagctggaagacgagtgctcagagctcaagaaggacattgatgacctggagctgacactggccaaggtggagaaggagaagcatgcaacagagaacaaggtgaagaacctaacagaggagatggctgggctggatgaaatcatcgctaagctgaccaaggagaagaaagctctacaagaggcccatcagcaggccctggatgaccttcaggttgaggaagacaaggtcaacagcctgtccaagtctaaggtcaagctggagcagcaggtggatgatctggagggatccctagagcaagagaagaaggtgcgcatggacctggagcgagcaaagcggaaactggagggcgacctgaagctgacccaggagagcatcatggacctggaaaatgataaactgcagctggaagaaaagcttaagaagaaggagtttgacattaatcagcagaacagtaagattgaggatgagcaggcgctggcccttcaactacagaagaaactgaaggaaaaccaggcacgcatcgaggagctggaggaggagctggaggccgagcgcaccgccagggctaaggtggagaagctgcgctcagacctgtctcgggagctggaggagatcagcgagcggctggaagaggccggcggggccacgtccgtgcagatcgagatgaacaagaagcgcgaggccgagttccagaagatgcggcgggacctggaggaggccacgctgcagcacgaggccactgccgcggccctgcgcaagaagcacgccgacagcgtggccgagctgggcgagcagatcgacaacctgcagcgggtgaagcagaagctggagaaggagaagagcgagttcaagctggagctggatgacgtcacctccaacatggagcagatcatcaaggccaaggcaaacctggagaaagtgtctcggacgctggaggaccaggccaatgagtaccgcgtgaagctagaagaggcccaacgctccctcaatgatttcaccacccagcgagccaagctgcagaccgagaatggagagttggcccggcagctagaggaaaaggaggcgctaatctcgcagctgacccgggggaagctctcttatacccagcaaatggaggacctcaaaaggcagctggaggaggagggcaaggcgaagaacgccctggcccatgcactgcagtcggcccggcatgactgcgacctgctgcgggagcagtacgaggaggagacagaggccaaggccgagctgcagcgcgtcctgtccaaggccaactcggaggtggcccagtggaggaccaagtatgagacggacgccattcagcggactgaggagctcgaagaggccaaaaagaagctggcccagcggctgcaggatgccgaggaggccgtggaggctgttaatgccaagtgctcctcactggagaagaccaagcaccggctacagaatgagatagaggacttgatggtggacgtagagcgctccaatgctgctgctgcagccctggacaagaagcagagaaactttgacaagatcctggccgagtggaagcagaagtatgaggagtcgcagtctgagctggagtcctcacagaaggaggctcgctccctcagcacagagctcttcaagctcaagaacgcctacgaggagtccctggagcacctagagaccttcaagcgggagaacaagaaccttcaggaggaaatctcggaccttactgagcagctaggagaaggaggaaagaatgtgcatgagctggagaaggtccgcaaacagctggaggtggagaagctggagctgcagtcagccctggaggaggcagaggcctccctggagcacgaggagggcaagatcctccgggcccagctagagttcaaccagatcaaggcagagatcgagcggaagctggcagagaaggacgaggagatggaacaggccaagcgcaaccaccagcgggtggtggactcgctgcagacctccctggatgcagagacacgcagccgcaacgaggtcctgagggtgaagaagaagatggaaggagacctcaatgagatggagatccagctcagccacgccaaccgcatggccgccgaggcccagaagcaagtcaagagcctccagagcttgctgaaggacacccagatccagctggacgatgcggtccgtgccaacgacgacctgaaggagaacatcgccatcgtggagcggcgcaacaacctgctgcaggctgagctggaggagctgcgtgccgtggtggagcagacagagcggtcccggaagctggcggagcaggagctgattgagaccagcgagcgggtgcagctgctgcattcccagaacaccagcctcatcaaccagaagaagaagatggagtcggatctgacccagctccagtcggaagtggaggaggcagtgcaggagtgcagaaacgccgaggagaaggccaagaaggccatcacggatgccgccatgatggcagaggagctgaagaaggagcaggacaccagcgcccacctggagcgcatgaagaagaacatggagcagaccattaaggacctgcagcaccggctggacgaggccgagcagatcgccctcaagggaggcaagaagcagctgcagaagctggaagcgcgggtgcgggagctggagggtgagctggaggccgagcagaagcgcaacgcagagtcggtgaagggcatgaggaagagcgagcggcgcatcaaggagctcacctaccagacagaggaagacaaaaagaacctgctgcggctacaggacctggtggacaagctgcaactgaaggtcaaggcctacaagcgccaggccgaggaggcggaggagcaagccaacaccaacctgtccaagttccgcaaggtgcagcatgagctggatgaggcagaggagcgggcggacatcgctgagtcccaggtcaacaagcttcgagccaagagccgtgacattggtgccaagcaaaaaatgcacgatgaggagtgacactgcctcgggaacctcactcttgccaacctgtaataaatatgagtgccaaactc

SEQ ID NO: 173 - DNA, 2477 bp, Homo sapiens
gaggacagatagagagactcctgcggcccagattcttcaggattctccgtgaagggataaccaggggaagcaccaagatgaccgatgcccagatggctgactttggggcagcggcccagtacctccgcaagtcagagaaggagcgtctagaggcccagacccggccctttgacattcgcactgagtgcttcgtgcccgatgacaaggaagagtttgtcaaagccaagattttgtcccgggagggaggcaaggtcattgctgaaaccgagaatgggaagacggtgactgtgaaggaggaccaggtgttgcagcagaacccacccaagttcgacaagattgaggacatggccatgctgaccttcctgcacgagcccgcggtgcttttcaacctcaaggagcgctacgcggcctggatgatatatacctactcgggcctcttctgtgtcactgtcaacccctacaagtggctgccggtgtacaatgccgaagtggtggccgcctacaggggcaagaagaggagtgaggccccgccccacatcttctccatctccgacaacgcctatcagtacatgctgacagatcgggagaaccagtccatcctcatcacgggagaatccggggcggggaagactgtgaacaccaagcgtgtcatccagtactttgccagcattgcagccataggtgaccgtggcaagaaggacaatgccaatgcgaacaagggcaccctggaggaccagatcatccaggccaaccccgctctggaggccttcggcaatgccaagactgtccggaacgacaactcctcccgctttgggaaattcattaggatccactttggggccactggaaagctggcttctgcagacatagagacctacctgctggagaagtcccgggtgatcttccagctgaaagctgagagaaactaccacatcttctaccagattctgtccaacaagaagccggagttgctggacatgctgctggtcaccaacaatccctacgactacgccttcgtgtctcagggagaggtgtccgtggcctccattgatgactccgaggagctcatggccaccgatagtgcctttgacgtgctgggcttcacttcagaggagaaagctggcgtctacaagctgacgggagccatcatgcactacgggaacatgaagttcaagcagaagcagcgggaggagcaggcggagccagacggcaccgaagatgctgacaagtcggcctacctcatggggctgaactcagctgacctgctcaaggggctgtgccaccctcgggtgaaagtgggcaacgagtatgtcaccaaggggcagagcgtgcagcaggtgtactactccatcggggctctggccaaggcagtgtatgagaagatgttcaactggatggtgacgcgcatcaacgccaccctggagaccaagcagccacgccagtacttcataggagtcctggacatcgctggcttcgagatcttcgacttcaacagctttgagcagctctgcatcaacttcaccaacgagaagctgcagcagttcttcaaccaccacatgttcgtgctggagcaggaggagtacaagaaggagggcattgagtggacattcattgactttggcatggacctgcaggcctgcattgacctcatcgagaaggtgcctccttggcctcaccacctatgccccctcctctgccatccagacaaagtggtggctgagtcccttctacacccaagaaactagagtcccaagaatcccaggcctttctccaggcccagcttctccccactgtgaagtcatgggcatgaacaggatgatccccccactcttcctttcccaggaccttgcactttatgcccctttgtggtggtcccctcagtgtcttaagagtgagatgtagtgaaggagaggcccctggcccctctgaccgcccatgagaagcgtcattcatggaaagatcctaggctgaaattagagatgtttggcctcccaccaccttcctgttggttgagaaataagccagtctccagccctcttgcttatgggcattcctcagaagagacaaggccgcaggcgggaggccccataggccggggctgacttgctctcagtgaacctctgctctttgtcagcataggccagagcccggattgtctgacccacacccagcccagccacggccttcatgaaatgggagcttccccacatgctttgggtcattatccagattcttaaccagagttctcatgtttcagagccctcagaatgccataaaactgtgtgtggaaaaaagcatgtgtacattcatacatacatgtgtgtgcttgtgcatgtgtgtgtgtgtacgtgtgtgtgtgtacatgcgtttttctggagagacagtctttagcttcaacaaattcttaaaaggattcctgccccaagaaaaatcaagaaccaccaggtttttggaagtgcagagtgtggtaaagaacc

SEQ ID NO: 174 - DNA, 214 bp, Artificial sequence
  Synthetic oligonucleotide
gggaagcaccaagatgaccgatgcccagatggctgactttggggcagcggcccagtacctccgcaagtcagagaaggagcgtctagaggcccagacccggccctttgacattcgcactgagtgcttcgtgcccgatgacaaggaagagtttgtcaaagccaagattttgtcccgggagggaggcaaggtcattgctgaaaccgagaatgggaag

SEQ ID NO: 175 - DNA, 122 bp, Artificial sequence
  Synthetic oligonucleotide
acggtgactgtgaaggaggaccaggtgttgcagcagaacccacccaagttcgacaagattgaggacatggccatgctgaccttcctgcacgagcccgcggtgcttttcaacctcaaggagcg

SEQ ID NO: 176 - DNA, 157 bp, Artificial sequence
  Synthetic oligonucleotide
acctactcgggcctcttctgtgtcactgtcaacccctacaagtggctgccggtgtacaatgccgaagtggtggccgcctacaggggcaagaagaggagtgaggccccgccccacatcttctccatctccgacaacgcctatcagtacatgctgacag

SEQ ID NO: 177 - DNA, 269 bp, Artificial sequence
  Synthetic oligonucleotide
atgctgacaagtcggcctacctcatggggctgaactcagctgacctgctcaaggggctgtgccaccctcgggtgaaagtgggcaacgagtatgtcaccaaggggcagagcgtgcagcaggtgtactactccatcggggctctggccaaggcagtgtatgagaagatgttcaactggatggtgacgcgcatcaacgccaccctggagaccaagcagccacgccagtacttcataggagtcctggacatcgctggcttcgagatcttcgac

SEQ ID NO: 178 - DNA, 171 bp, Artificial sequence
  Synthetic oligonucleotide
ttcaacagctttgagcagctctgcatcaacttcaccaacgagaagctgcagcagttcttcaaccaccacatgttcgtgctggagcaggaggagtacaagaaggagggcattgagtggacattcattgactttggcatggacctgcaggcctgcattgacctcatcgagaag

SEQ ID NO: 179 - DNA, 819 bp, Artificial sequence
  Synthetic oligonucleotide
gtgcctccttggcctcaccacctatgccccctcctctgccatccagacaaagtggtggctgagtcccttctacacccaagaaactagagtcccaagaatcccaggcctttctccaggcccagcttctccccactgtgaagtcatgggcatgaacaggatgatccccccactcttcctttcccaggaccttgcactttatgcccctttgtggtggtcccctcagtgtcttaagagtgagatgtagtgaaggagaggcccctggcccctctgaccgcccatgagaagcgtcattcatggaaagatcctaggctgaaattagagatgtttggcctcccaccaccttcctgttggttgagaaataagccagtctccagccctcttgcttatgggcattcctcagaagagacaaggccgcaggcgggaggccccataggccggggctgacttgctctcagtgaacctctgctctttgtcagcataggccagagcccggattgtctgacccacacccagcccagccacggccttcatgaaatgggagcttccccacatgctttgggtcattatccagattcttaaccagagttctcatgtttcagagccctcagaatgccataaaactgtgtgtggaaaaaagcatgtgtacattcatacatacatgtgtgtgcttgtgcatgtgtgtgtgtgtacgtgtgtgtgtgtacatgcgtttttctggagagacagtctttagcttcaacaaattcttaaaaggattcctgccccaagaaaaatcaagaaccaccaggtttttggaagtgcagagtgtggtaaagaacc

SEQ ID NO: 180 - DNA, 132 bp, Artificial sequence
  Synthetic oligonucleotide
gtaccagcacagcgccccttcagcaggccagcgctactggctccagattccttttcctgtcagggtatgggactgtggaagcctgggagtgtgctcagtgattctctctttgcctcttcaccctgccctcag

SEQ ID NO: 181 - DNA, 310 bp, Artificial sequence
  Synthetic oligonucleotide
cccatgggcatcatgtccatcctggaggaggagtgcatgttccccaaggccactgacatgaccttcaaggccaagctgtacgacaaccacctgggcaagtccaacaatttccagaagccacgcaacatcaaggggaagcaggaagcccacttctccctgatccactacgccggcactgtggactacaacatcctgggctggctggaaaaaaacaaggatcctctcaacgagactgttgtggccctgtaccagaagtcctccctcaagctcatggccactctcttctcctcctacgcaactgccgatactg

SEQ ID NO: 182 - DNA, 124 bp, Artificial sequence
  Synthetic oligonucleotide
gtatcgcatcctgaacccagtggccatccctgagggacagttcattgatagcaggaaggggacagagaagctgctcagctctctggacattgatcacaaccagtacaagtttggccacaccaag

SEQ ID NO: 183 - DNA, 137 bp, Artificial sequence
  Synthetic oligonucleotide
gtgttcttcaaggcagggctgcttgggctgctggaggagatgcgggatgagaggctgagccgcatcatcacgcgcatgcaggcccaagcccggggccagctcatgcgcattgagttcaagaagatagtggaacgcag

SEQ ID NO: 184 - DNA, 256 bp, Artificial sequence
  Synthetic oligonucleotide
ggatgccctgctggtaatccagtggaacattcgggccttcatgggggtcaagaattggccctggatgaagctctacttcaagatcaagccgctgctgaagagcgcagagacggagaaggagatggccaccatgaaggaagagttcgggcgcatcaaagagacgctggagaagtccgaggctcgccgcaaggagctggaggagaagatggtgtccctgctgcaggagaagaatgacctgcagctccaagtgcaggcg

SEQ ID NO: 185 - DNA, 243 bp, Artificial sequence
  Synthetic oligonucleotide
gaacaagacaacctcaatgatgctgaggagcgctgcgaccagctgatcaaaaacaagattcagctggaggccaaagtaaaggagatgaatgagaggctggaggatgaggaggagatgaacgcggagctcactgccaagaagcgcaagctggaagacgagtgctcagagctcaagaaggacattgatgacctggagctgacactggccaaggtggagaaggagaagcatgcaacagagaacaag

SEQ ID NO: 186 - DNA, 177 bp, Artificial sequence
  Synthetic oligonucleotide
gtgaagaacctaacagaggagatggctgggctggatgaaatcatcgctaagctgaccaaggagaagaaagctctacaagaggcccatcagcaggccctggatgaccttcaggttgaggaagacaaggtcaacagcctgtccaagtctaaggtcaagctggagcagcaggtggatgat

SEQ ID NO: 187 - DNA, 146 bp, Artificial sequence
  Synthetic oligonucleotide
ctggagggatccctagagcaagagaagaaggtgcgcatggacctggagcgagcaaagcggaaactggagggcgacctgaagctgacccaggagagcatcatggacctggaaaatgataaactgcagctggaagaaaagcttaagaa

SEQ ID NO: 188 - DNA, 270 bp, Artificial sequence
  Synthetic oligonucleotide
gcacgcatcgaggagctggaggaggagctggaggccgagcgcaccgccagggctaaggtggagaagctgcgctcagacctgtctcgggagctggaggagatcagcgagcggctggaagaggccggcggggccacgtccgtgcagatcgagatgaacaagaagcgcgaggccgagttccagaagatgcggcgggacctggaggaggccacgctgcagcacgaggccactgccgcggccctgcgcaagaagcacgccgacagcgtggccgag

SEQ ID NO: 189 - DNA, 337 bp, Artificial sequence
  Synthetic oligonucleotide
gtgaggcccagtggggagggtgggcaggcttgatggcagccctggggcaattcatctcagtgccagaaatggagcctggagctggaaagagtcctctgcaagggaaagaccctccagtctaggttctgccctgcagctaagcgtcatttaatgcctcttttcttattcgtaaggggatggggtgagcagactgggaaactcctcaaacagtgaggtgccacatcagcccacatggtgaataaggctgggcttggttgaagtactacataagaagagaatctagagaatggggcacagggagtccctcccacctcctggtgcccccccccctccccag

SEQ ID NO: 190 - DNA, 184 bp, Artificial sequence
  Synthetic oligonucleotide
aaagaagctggcccagcggctgcaggatgccgaggaggccgtggaggctgttaatgccaagtgctcctcactggagaagaccaagcaccggctacagaatgagatagaggacttgatggtggacgtagagcgctccaatgctgctgctgcagccctggacaagaagcagagaaactttgacaag

SEQ ID NO: 191 - DNA, 166 bp, Artificial sequence
  Synthetic oligonucleotide
atcctggccgagtggaagcagaagtatgaggagtcgcagtctgagctggagtcctcacagaaggaggctcgctccctcagcacagagctcttcaagctcaagaacgcctacgaggagtccctggagcacctagagaccttcaagcgggagaacaagaaccttcagg

SEQ ID NO: 192 - DNA, 135 bp, Artificial sequence
  Synthetic oligonucleotide
gaggagggcaagatcctccgggcccagctagagttcaaccagatcaaggcagagatcgagcggaagctggcagagaaggacgaggagatggaacaggccaagcgcaaccaccagcgggtggtggactcgctgcag

SEQ ID NO: 193 - DNA, 129 bp, Artificial sequence
  Synthetic oligonucleotide
acctccctggatgcagagacacgcagccgcaacgaggtcctgagggtgaagaagaagatggaaggagacctcaatgagatggagatccagctcagccacgccaaccgcatggccgccgaggcccagaag

SEQ ID NO: 194 - DNA, 204 bp, Artificial sequence
  Synthetic oligonucleotide
gacacccagatccagctggacgatgcggtccgtgccaacgacgacctgaaggagaacatcgccatcgtggagcggcgcaacaacctgctgcaggctgagctggaggagctgcgtgccgtggtggagcagacagagcggtcccggaagctggcggagcaggagctgattgagaccagcgagcgggtgcagctgctgcattcccag

SEQ ID NO: 195 - DNA, 198 bp, Artificial sequence
  Synthetic oligonucleotide
gtaagtgaccgcccaccttccgcctcccctaaagacagaaacaaggccttgggtccaggccaggccactgtgctgtaacaccaagccaactctgcagttctgtggatttgagggcctgatgggagaaaggagatccttggggggcaaaaggccccggcccctggcccatgttccttgccacctctctcctgcacacag

SEQ ID NO: 196 - DNA, 276 bp, Artificial sequence
  Synthetic oligonucleotide
gccgccatgatggcagaggagctgaagaaggagcaggacaccagcgcccacctggagcgcatgaagaagaacatggagcagaccattaaggacctgcagcaccggctggacgaggccgagcagatcgccctcaagggaggcaagaagcagctgcagaagctggaagcgcgggtgcgggagctggagggtgagctggaggccgagcagaagcgcaacgcagagtcggtgaagggcatgaggaagagcgagcggcgcatcaaggagctcacctaccag

SEQ ID NO: 197 - DNA, 224 bp, Artificial sequence
  Synthetic oligonucleotide
gtgcggcggacgccagacaccgggagtagatgtggaagtttcttctctggccccactgccccgccctcacagggctcctctcacctcctccttgagatgctgttggtagatttaacgttcttctcacgctctgcagtcagtttgacttgagtctatgagtttttccagcaaatgaagaatctacttctacttcctgaaaactcttctaactagtctttccccag

SEQ ID NO: 198 - DNA, 897 bp, Artificial sequence
  Synthetic oligonucleotide
gtttctttctttctttttttttttttttaataactctaagtgctaccatgaagacttcagaacagttcaaagaatccttccaccttcgactgtggggataagagtcaggggaggggaaaagacccggaaatcttccatagaacttctggcacacaaagagaaggccacagagaaagaggaccctagaatgctctaaaacctccacttgcatagctgagagctgtgcccttggcccgttattttcagtgtacctgggaagaaaaggccaaggagacgagggtgtcagtccatttgatagatggataccagaggcacaagaaagaggttacagatacagaaccacagagtgatttgtggacagaagtagaaatggcatcctggcacatacaatgataaagagataggaatgatcgagtgacgttggagccagtgatcccgatgcctgaattctggcccagtacaatatattagaatgtagaataatctggattatgataatacccccttctttctgcattctttttctggtcaagaactactggccaagagaacctatgtaagtccaggttggagctttatccaccatactggagctggaacagacctggtgcttttatattaccacattagggaattccattaggttctgagcccctccccctacttctagctttatgacttcagccttcattgctctgtggatccctgactgacaaccttgcattgcccctttgacctacgatagagtcagagaatcttccccaccacctctttgacctggatcattgcagggaggggcagcaaaggcaaggggagaagagtaaaatgatggaggagggaaaggtgattgcatttgctccccctccaaaccagcttctcccaccctcccacccccag

SEQ ID NO: 199 - DNA, 135 bp, Artificial sequence
  Synthetic oligonucleotide
gaggagcaagccaacaccaacctgtccaagttccgcaaggtgcagcatgagctggatgaggcagaggagcgggcggacatcgctgagtcccaggtcaacaagcttcgagccaagagccgtgacattggtgccaag

SEQ ID NO: 200 - DNA, 1927 bp, Artificial sequence
  Synthetic oligonucleotide
caaaaaatgcacgatgaggagtgacactgcctcgggaacctcactcttgccaacctgtaataaatatgagtgccaaactctgcctgagcccatctgtccttcctgccagctgtccatcctggatcagggcagtagggggcctgagaggagggaggcccccagcccctgtatcagagctgccagagccaaggcatcccatatccacaaggaaggagaccgaggtgcagaggagtgaggtgttctgcctgacgtggacagctgtgagtcccagttctgctcagtcaaccacacaagggtggagagggagaaatttcaaaagtgaagaaaacaatggcatcaaaatggtgagccagtccaagatgctacgagatagaattttggtgccgaagttgaagccactctccacctaccccacccctgaggctgcaatgattaaaggtgtcctaggacacccattctttctgaaatgaattttccaccaatgccagaaaaggctcagagctggctgagaattaaggtatgggaaaggagatgggagagattccattctagtcagcccctaggaagtaactcccagggagccccctccctgtcttccccaggggtctccccctgcctcctatgattcagcacctcaccgtgagggcatcttgagactctggggccaatcaacactgagcccaaaccaatatgccatgaggaccaagcctgggcattgctcatttcatgttggttctcacacagacacagatggcacaggtgcctgtacagggaaacactgtggtcacatttctgctctctctaagctcctactggggacagtctggcctggatcacacagctgcttgtgggacaggcccggtcctgaccccgttctgcacaaagcaaatccccactccccactgggctttgcagccaggctctgctgaccgcctccttaaccgttcacctggcaccccatctccctgactccccaagtggagcctcttctatccctcctctgagaccatgagaatggactgtgcataaagccctgagaaatgtgagcagtgaccagagaaacacaaaatcctgttggttctagcccaggagaggctgccagttctgatggtgagccaggacacaaggataggagaacaggaagcaggaggcaggaaaaagaccaagagagaggagtggctgccaccaaggaagcagagcgctctgaccagagttcaagatccagggttcgggcaggacttgggagctggggcctgcagctggaaggagcgctccagaagaaggattgtatctcagggcgggaacacacacacatcagcgacaggagatagcacgtcagctgggatggagctgctgagccaggccatgctgggctcctcgggctgggcaggaacgtctggctgcacatctgtctgtctcggcccagcagggctgactcccgggctgtggcagtgtctgctccaaactcccctgggccttcccatagcattcactgtggggagctcttgaccagcttgtctctttcccagcctgtgagtgctaaagggcaggccccccgtcacctctgaggccctggcacccagcacagtgtgcatgggagatgctcaggaaatgtgtgctgaggagctggcaagctgggagggtggacccgcagtggagggaagagttggccattcttttctgagctacaaggaggctcagtacagtatccagaacactcgcttaggtgtcagaagagctgcgttctggccctagctctgtcacaaatgagttcacctcccctggctgggcctgttttctcttatgtgaaatgagggcattggaccagctgataatcaacggctctcccagcattcgcattttgggaaatctctccctcctctgatacctcaggctgccctctccctgcctcctgttcctgtcatag

SEQ ID NO: 201 - DNA, 31 bp, Artificial sequence
  Synthetic oligonucleotide
gaggacagatagagagactcctgcggcccag

SEQ ID NO: 202 - DNA, 33 bp, Artificial sequence
  Synthetic oligonucleotide
attcttcaggattctccgtgaagggataaccag

SEQ ID NO: 203 - DNA, 22 bp, Artificial sequence
  Synthetic oligonucleotide
ctacgcggcctggatgatatat

SEQ ID NO: 204 - DNA, 28 bp, Artificial sequence
  Synthetic oligonucleotide
atcgggagaaccagtccatcctcatcac

SEQ ID NO: 205 - DNA, 112 bp, Artificial sequence
  Synthetic oligonucleotide
gggagaatccggggcggggaagactgtgaacaccaagcgtgtcatccagtactttgccagcattgcagccataggtgaccgtggcaagaaggacaatgccaatgcgaacaag

SEQ ID NO: 206 - DNA, 93 bp, Artificial sequence
  Synthetic oligonucleotide
ggcaccctggaggaccagatcatccaggccaaccccgctctggaggccttcggcaatgccaagactgtccggaacgacaactcctcccgcttt

SEQ ID NO: 207 - DNA, 64 bp, Artificial sequence
  Synthetic oligonucleotide
gggaaattcattaggatccactttggggccactggaaagctggcttctgcagacatagagacct

SEQ ID NO: 208 - DNA, 99 bp, Artificial sequence
  Synthetic oligonucleotide
acctgctggagaagtcccgggtgatcttccagctgaaagctgagagaaactaccacatcttctaccagattctgtccaacaagaagccggagttgctgg

SEQ ID NO: 209 - DNA, 104 bp, Artificial sequence
  Synthetic oligonucleotide
acatgctgctggtcaccaacaatccctacgactacgccttcgtgtctcagggagaggtgtccgtggcctccattgatgactccgaggagctcatggccaccgat

SEQ ID NO: 210 - DNA, 117 bp, Artificial sequence
  Synthetic oligonucleotide
agtgcctttgacgtgctgggcttcacttcagaggagaaagctggcgtctacaagctgacgggagccatcatgcactacgggaacatgaagttcaagcagaagcagcgggaggagcag

SEQ ID NO: 211 - DNA, 22 bp, Artificial sequence
  Synthetic oligonucleotide
gcggagccagacggcaccgaag

SEQ ID NO: 212 - DNA, 71 bp, Artificial sequence
  Synthetic oligonucleotide
gggacagtggtaaaagcaaaggaggcaagaaaaagggctcatccttccagacggtgtcggctctccaccgg

SEQ ID NO: 213 - DNA, 88 bp, Artificial sequence
  Synthetic oligonucleotide
gaaaatctcaacaagctaatgaccaacctgaggaccacccatcctcactttgtgcgttgcatcatccccaatgagcggaaggctccag

SEQ ID NO: 214 - DNA, 118 bp, Artificial sequence
  Synthetic oligonucleotide
gggtgatggacaaccccctggtcatgcaccagctgcgctgcaatggcgtgctggagggcatccgcatctgcaggaagggcttccccaaccgcatcctctacggggacttccggcagag

SEQ ID NO: 215 - DNA, 91 bp, Artificial sequence
  Synthetic oligonucleotide
gaaggagtttgacattaatcagcagaacagtaagattgaggatgagcaggcgctggcccttcaactacagaagaaactgaaggaaaaccag

SEQ ID NO: 216 - DNA, 12 bp, Artificial sequence
  Synthetic oligonucleotide
ctgggcgagcag

SEQ ID NO: 217 - DNA, 30 bp, Artificial sequence
  Synthetic oligonucleotide
atcgacaacctgcagcgggtgaagcagaag

SEQ ID NO: 218 - DNA, 78 bp, Artificial sequence
  Synthetic oligonucleotide
ctggagaaggagaagagcgagttcaagctggagctggatgacgtcacctccaacatggagcagatcatcaaggccaag

SEQ ID NO: 219 - DNA, 102 bp, Artificial sequence
  Synthetic oligonucleotide
gcaaacctggagaaagtgtctcggacgctggaggaccaggccaatgagtaccgcgtgaagctagaagaggcccaacgctccctcaatgatttcaccacccag

SEQ ID NO: 220 - DNA, 25 bp, Artificial sequence
  Synthetic oligonucleotide
cgagccaagctgcagaccgagaatg

SEQ ID NO: 221 - DNA, 119 bp, Artificial sequence
  Synthetic oligonucleotide
gagagttggcccggcagctagaggaaaaggaggcgctaatctcgcagctgacccgggggaagctctcttatacccagcaaatggaggacctcaaaaggcagctggaggaggagggcaag

SEQ ID NO: 222 - DNA, 24 bp, Artificial sequence
  Synthetic oligonucleotide
gcgaagaacgccctggcccatgca

SEQ ID NO: 223 - DNA, 66 bp, Artificial sequence
  Synthetic oligonucleotide
ctgcagtcggcccggcatgactgcgacctgctgcgggagcagtacgaggaggagacagaggccaag

SEQ ID NO: 224 - DNA, 72 bp, Artificial sequence
  Synthetic oligonucleotide
gccgagctgcagcgcgtcctgtccaaggccaactcggaggtggcccagtggaggaccaagtatgagacggac

SEQ ID NO: 225 - DNA, 35 bp, Artificial sequence
  Synthetic oligonucleotide
gccattcagcggactgaggagctcgaagaggccaa

SEQ ID NO: 226 - DNA, 104 bp, Artificial sequence
  Synthetic oligonucleotide
gtgtgctgggggtccaagaggccagagatgagttggtgggagggagggccatgcaggggcagggggaacataggctttgagctttctggccctctggtccccag

SEQ ID NO: 227 - DNA, 77 bp, Artificial sequence
  Synthetic oligonucleotide
aggaaatctcggaccttactgagcagctaggagaaggaggaaagaatgtgcatgagctggagaaggtccgcaaacag

SEQ ID NO: 228 - DNA, 21 bp, Artificial sequence
  Synthetic oligonucleotide
ctggaggtggagaagctggag

SEQ ID NO: 229 - DNA, 27 bp, Artificial sequence
  Synthetic oligonucleotide
ctgcagtcagccctggaggaggcagag

SEQ ID NO: 230 - DNA, 15 bp, Artificial sequence
  Synthetic oligonucleotide
gcctccctggagcac

SEQ ID NO: 231 - DNA, 30 bp, Artificial sequence
  Synthetic oligonucleotide
caagtcaagagcctccagagcttgctgaag

SEQ ID NO: 232 - DNA, 57 bp, Artificial sequence
  Synthetic oligonucleotide
aacaccagcctcatcaaccagaagaagaagatggagtcggatctgacccagctccag

SEQ ID NO: 233 - DNA, 69 bp, Artificial sequence
  Synthetic oligonucleotide
tcggaagtggaggaggcagtgcaggagtgcagaaacgccgaggagaaggccaagaaggccatcacggat

SEQ ID NO: 234 - DNA, 96 bp, Artificial sequence
  Synthetic oligonucleotide
acagaggaagacaaaaagaacctgctgcggctacaggacctggtggacaagctgcaactgaaggtcaaggcctacaagcgccaggccgaggaggcg

SEQ ID NO: 235 - protein, 1939 aa, Homo sapiens
MTDAQMADFGAAAQYLRKSEKERLEAQTRPFDIRTECFVPDDKEEFVKAKILSREGGKVIAETENGKTVTVKEDQVLQQNPPKFDKIQDMAMLTFLHEPAVLFNLKERYAAWMIYTYSGLFCVTVNPYKWLPVYNAEVVAAYRGKKRSEAPPHIFSISDNAYQYMLTDRENQSILITGESGAGKTVNTKRVIQYFASIAAIGDRGKKDNANANKGTLEDQIIQANPALEAFGNAKTVRNDNSSRFGKFIRIHFGATGKLASADIETYLLEKSRVIFQLKAERNYHIFYQILSNKKPELLDMLLVTNNPYDYAFVSQGEVSVASIDDSEELMATDSAFDVLGFTSEEKAGVYKLTGAIMHYGNMKFKQKQREEQAEPDGTEDADKSAYLMGLNSADLLKGLCHPRVKVGNEYVTKGQSVQQVYYSIGALAKAVYEKMFNWMVTRINATLETKQPRQYFIGVLDIAGFEIFDFNSFEQLCINFTNEKLQQFFNHHMFVLEQEEYKKEGIEWTFIDFGMDLQACIDLIEKPMGIMSILEEECMFPKATDMTFKAKLYDNHLGKSNNFQKPRNIKGKQEAHFSLIHYAGTVDYNILGWLEKNKDPLNETVVALYQKSSLKLMATLFSSYATADTGDSGKSKGGKKKGSSFQTVSALHRENLNKLMTNLRTTHPHFVRCIIPNERKAPGVMDNPLVMHQLRCNGVLEGIRICRKGFPNRILYGDFRQRYRILNPVAIPEGQFIDSRKGTEKLLSSLDIDHNQYKFGHTKVFFKAGLLGLLEEMRDERLSRIITRMQAQARGQLMRIEFKKIVERRDALLVIQWNIRAFMGVKNWPWMKLYFKIKPLLKSAETEKEMATMKEEFGRIKETLEKSEARRKELEEKMVSLLQEKNDLQLQVQAEQDNLNDAEERCDQLIKNKIQLEAKVKEMNERLEDEEEMNAELTAKKRKLEDECSELKKDIDDLELTLAKVEKEKHATENKVKNLTEEMAGLDEIIAKLTKEKKALQEAHQQALDDLQVEEDKVNSLSKSKVKLEQQVDDLEGSLEQEKKVRMDLERAKRKLEGDLKLTQESIMDLENDKLQLEEKLKKKEFDINQQNSKIEDEQALALQLQKKLKENQARIEELEEELEAERTARAKVEKLRSDLSRELEEISERLEEAGGATSVQIEMNKKREAEFQKMRRDLEEATLQHEATAAALRKKHADSVAELGEQIDNLQRVKQKLEKEKSEFKLELDDVTSNMEQIIKAKANLEKVSRTLEDQANEYRVKLEEAQRSLNDFTTQRAKLQTENGELARQLEEKEALISQLTRGKLSYTQQMEDLKRQLEEEGKAKNALAHALQSARHDCDLLREQYEEETEAKAELQRVLSKANSEVAQWRTKYETDAIQRTEELEEAKKKLAQRLQDAEEAVEAVNAKCSSLEKTKHRLQNEIEDLMVDVERSNAAAAALDKKQRNFDKILAEWKQKYEESQSELESSQKEARSLSTELFKLKNAYEESLEHLETFKRENKNLQEEISDLTEQLGEGGKNVHELEKVRKQLEVEKLELQSALEEAEASLEHEEGKILRAQLEFNQIKAEIERKLAEKDEEMEQAKRNHQRVVDSLQTSLDAETRSRNEVLRVKKKMEGDLNEMEIQLSHANRMAAEAQKQVKSLQSLLKDTQIQLDDAVRANDDLKENIAIVERRNNLLQAELEELRAVVEQTERSRKLAEQELIETSERVQLLHSQNTSLINQKKKMEADLTQLQSEVEEAVQECRNAEEKAKKAITDAAMMAEELKKEQDTSAHLERMKKNMEQTIKDLQHRLDEAEQIALKGGKKQLQKLEARVRELEGELEAEQKRNAESVKGMRKSERRIKELTYQTEEDKKNLLRLQDLVDKLQLKVKAYKRQAEEAEEQANTNLSKFRKVQHELDEAEERADIAESQVNKLRAKSRDIGAKQKMHDEE

SEQ ID NO: 236 - protein, 1939 aa, Homo sapiens [sequence omitted]

SEQ ID NO: 237 - protein, 1939 aa, Homo sapiens
MTDAQMADFGAAAQYLRKSEKERLEAQTRPFDIRTECFVPDDKEEFVKAKILSREGGKVIAETENGKTVTVKEDQVLQQNPPKFDKIEDMAMLTFLHEPAVLFNLKERYAAWMIYTYSGLFCVTVNPYKWLPVYNAEVVAAYRGKKRSEAPPHIFSISDNAYQYMLTDRENQSILITGESGAGKTVNTKRVIQYFASIAAIGDRGKKDNANANKGTLEDQIIQANPALEAFGNAKTVRNDNSSRFGKFIRIHFGATGKLASADIETYLLEKSRVIFQLKAERNYHIFYQILSNKKPELLDMLLVTNNPYDYAFVSQGEVSVASIDDSEELMATDSAFDVLGFTSEEKAGVYKLTGAIMHYGNMKFKQKQREEQAEPDGTEDADKSAYLMGLNSADLLKGLCHPRVKVGNEYVTKGQSVQQVYYSIGALAKAVYEKMFNWMVTRINATLETKQPRQYFIGVLDIAGFEIFDFNSFEQLCINFTNEKLQQFFNHHMFVLEQEEYKKEGIEWTFIDFGMDLQACIDLIEKPMGIMSILEEECMFPKATDMTFKAKLYDNHLGKSNNFQKPRNIKGKQEAHFSLIHYAGTVDYNILGWLEKNKDPLNETVVALYQKSSLKLMATLFSSYATADTGDSGKSKGGKKKGSSFQTVSALHRENLNKLMTNLRTTHPHFVRCIIPNERKAPGVMDNPLVMHQLRCNGVLEGIRICRKGFPNRILYGDFRQRYRILNPVAIPEGQFIDSRKGTEKLLSSLDIDHNQYKFGHTKVFFKAGLLGLLEEMRDERLSRIITRMQAQARGQLMRIEFKKIVERRDALLVIQWNIRAFMGVKNWPWMKLYFKIKPLLKSAETEKEMATMKEEFGRIKETLEKSEARRKELEEKMVSLLQEKNDLQLQVQAEQDNLNDAEERCDQLIKNKIQLEAKVKEMNERLEDEEEMNAELTAKKRKLEDECSELKKDIDDLELTLAKVEKEKHATENKVKNLTEEMAGLDEIIAKLTKEKKALQEAHQQALDDLQVEEDKVNSLSKSKVKLEQQVDDLEGSLEQEKKVRMDLERAKRKLEGDLKLTQESIMDLENDKLQLEEKLKKKEFDINQQNSKIEDEQALALQLQKKLKENQARIEELEEELEAERTARAKVEKLRSDLSRELEEISERLEEAGGATSVQIEMNKKREAEFQKMRRDLEEATLQHEATAAALRKKHADSVAELGEQIDNLQRVKQKLEKEKSEFKLELDDVTSNMEQIIKAKANLEKVSRTLEDQANEYRVKLEEAQRSLNDFTTQRAKLQTENGELARQLEEKEALISQLTRGKLSYTQQMEDLKRQLEEEGKAKNALAHALQSARHDCDLLREQYEEETEAKAELQRVLSKANSEVAQWRTKYETDAIQRTEELEEAKKKLAQRLQDAEEAVEAVNAKCSSLEKTKHRLQNEIEDLMVDVERSNAAAAALDKKQRNFDKILAEWKQKYEESQSELESSQKEARSLSTELFKLKNAYEESLEHLETFKRENKNLQEEISDLTEQLGEGGKNVHELEKVRKQLEVEKLELQSALEEAEASLEHEEGKILRAQLEFNQIKAEIERKLAEKDEEMEQAKRNHQRVVDSLQTSLDAETRSRNEVLRVKKKMEGDLNEMEIQLSHANRMAAEAQKQVKSLQSLLKDTQIQLDDAVRANDDLKENIAIVERRNNLLQAELEELRAVVEQTERSRKLAEQELIETSERVQLLHSQNTSLINQKKKMEADLTQLQSEVEEAVQECRNAEEKAKKAITDAAMMAEELKKEQDTSAHLERMKKNMEQTIKDLQHRLDEAEQIALKGGKKQLQKLEARVRELEGELEAEQKRNAESVKGMRKSERRIKELTYQTEEDKKNLLRLQDLVDKLQLKVKAYKRQAEEAEEQANTNLSKFRKVQHELDEAEERADIAESQVNKLRAKSRDIGAKQKMHDEE

SEQ ID NO: 238 - protein, 1939 aa, Homo sapiens
MTDAQMADFGAAAQYLRKSEKERLEAQTRPFDIRTECFVPDDKEEFVKAKILSREGGKVIAETENGKTVTVKEDQVLQQNPPKFDKIQDMAMLTFLHEPAVLFNLKERYAAWMIYTYSGLFCVTVNPYKWLPVYNAEVVAAYRGKKRSEAPPHIFSISDNAYQYMLTDRENQSILITGESGAGKTVNTKRVIQYFASIAAIGDRGKKDNANANKGTLEDQIIQANPALEAFGNAKTVRNDNSSRFGKFIRIHFGATGKLASADIETYLLEKSRVIFQLKAERNYHIFYQILSNKKPELLDMLLVTNNPYDYAFVSQGEVSVASIDDSEELMATDSAFDVLGFTSEEKAGVYKLTGAIMHYGNMKFKQKQREEQAEPDGTEDADKSAYLMGLNSADLLKGLCHPRVKVGNEYVTKGQSVQQVYYSIGALAKAVYEKMFNWMVTRINATLETKQPRQYFIGVLDIAGFEIFDFNSFEQLCINFTNEKLQQFFNHHMFVLEQEEYKKEGIEWTFIDFGMDLQACIDLIEKPMGIMSILEEECMFPKATDMTFKAKLYDNHLGKSNNFQKPRNIKGKQEAHFSLIHYAGTVDYNILGWLEKNKDPLNETVVALYQKSSLKLMATLFSSYATADTGDSGKSKGGKKKGSSFQTVSALHRENLNKLMTNLRTTHPHFVRCIIPNERKAPGVMDNPLVMHQLRCNGVLEGIRICRKGFPNRILYGDFRQRYRILNPVAIPEGQFIDSRKGTEKLLSSLDIDHNQYKFGHTKVFFKAGLLGLLEEMRDERLSRIITRMQAQARGQLMRIEFKKIVERRDALLVIQWNIRAFMGVKNWPWMKLYFKIKPLLKSAETEKEMATMKEEFGRIKETLEKSEARRKELEEKMVSLLQEKNDLQLQVQAEQDNLNDAEERCDQLIKNKIQLEAKVKEMNERLEDEEEMNAELTAKKRKLEDECSELKKDIDDLELTLAKVEKEKHATENKVKNLTEEMAGLDEIIAKLTKEKKALQEAHQQALDDLQVEEDKVNSLSKSKVKLEQQVDDLEGSLEQEKKVRMDLERAKRKLEGDLKLTQESIMDLENDKLQLEEKLKKKEFDINQQNSKIEDEQALALQLQKKLKENQARIEELEEELEAERTARAKVEKLRSDLSRELEEISERLEEAGGATSVQIEMNKKREAEFQKMRRDLEEATLQHEATAAALRKKHADSVAELGEQIDNLQRVKQKLEKEKSEFKLELDDVTSNMEQIIKAKANLEKVSRTLEDQANEYRVKLEEAQRSLNDFTTQRAKLQTENGELARQLEEKEALISQLTRGKLSYTQQMEDLKRQLEEEGKAKNALAHALQSARHDCDLLREQYEEETEAKAELQRVLSKANSEVAQWRTKYETDAIQRTEELEEAKKKLAQRLQDAEEAVEAVNAKCSSLEKTKHRLQNEIEDLMVDVERSNAAAAALDKKQRNFDKILAEWKQKYEESQSELESSQKEARSLSTELFKLKNAYEESLEHLETFKRENKNLQEEISDLTEQLGEGGKNVHELEKVRKQLEVEKLELQSALEEAEASLEHEEGKILRAQLEFNQIKAEIERKLAEKDEEMEQAKRNHQRVVDSLQTSLDAETRSRNEVLRVKKKMEGDLNEMEIQLSHANRMAAEAQKQVKSLQSLLKDTQIQLDDAVRANDDLKENIAIVERRNNLLQAELEELRAVVEQTERSRKLAEQELIETSERVQLLHSQNTSLINQKKKMESDLTQLQSEVEEAVQECRNAEEKAKKAITDAAMMAEELKKEQDTSAHLERMKKNMEQTIKDLQHRLDEAEQIALKGGKKQLQKLEARVRELEGELEAEQKRNAESVKGMRKSERRIKELTYQTEEDKKNLLRLQDLVDKLQLKVKAYKRQAEEAEEQANTNLSKFRKVQHELDEAEERADIAESQVNKLRAKSRDIGAKQKMHDEE

SEQ ID NO: 239 - protein, 1904 aa, Homo sapiens
MTDAQMADFGAAAQYLRKSEKERLEAQTRPFDIRTECFVPDDKEEFVKAKILSREGGKVIAETENGKTVTVKEDQVLQQNPPKFDKIEDMAMLTFLHEPAVLFNLKERYAAWMIYTYSGLFCVTVNPYKWLPVYNAEVVAAYRGKKRSEAPPHIFSISDNAYQYMLTDRENQSILITGESGAGKTVNTKRVIQYFASIAAIGDRGKKDNANANKGTLEDQIIQANPALEAFGNAKTVRNDNSSRFGKFIRIHFGATGKLASADIETYLLEKSRVIFQLKAERNYHIFYQILSNKKPELLDMLLVTNNPYDYAFVSQGEVSVASIDDSEELMATDSAFDVLGFTSEEKAGVYKLTGAIMHYGNMKFKQKQREEQAEPDGTEDADKSAYLMGLNSADLLKGLCHPRVKVGNEYVTKGQSVQQVYYSIGALAKAVYEKMFNWMVTRINATLETKQPRQYFIGVLDIAGFEIFDFNSFEQLCINFTNEKLQQFFNHHMFVLEQEEYKKEGIEWTFIDFGMDLQACIDLIEKPMGIMSILEEECMFPKATDMTFKAKLYDNHLGKSNNFQKPRNIKGKQEAHFSLIHYAGTVDYNILGWLEKNKDPLNETVVALYQKSSLKLMATLFSSYATADTGDSGKSKGGKKKGSSFQTVSALHRENLNKLMTNLRTTHPHFVRCIIPNERKAPGVMDNPLVMHQLRCNGVLEGIRICRKGFPNRILYGDFRQRYRILNPVAIPEGQFIDSRKGTEKLLSSLDIDHNQYKFGHTKVFFKAGLLGLLEEMRDERLSRIITRMQAQARGQLMRIEFKKIVERRDALLVIQWNIRAFMGVKNWPWMKLYFKIKPLLKSAETEKEMATMKEEFGRIKETLEKSEARRKELEEKMVSLLQEKNDLQLQVQAEQDNLNDAEERCDQLIKNKIQLEAKVKEMNERLEDEEEMNAELTAKKRKLEDECSELKKDIDDLELTLAKVEKEKHATENKVKNLTEEMAGLDEIIAKLTKEKKALQEAHQQALDDLQVEEDKVNSLSKSKVKLEQQVDDLEGSLEQEKKVRMDLERAKRKLEGDLKLTQESIMDLENDKLQLEEKLKKKEFDINQQNSKIEDEQALALQLQKKLKENQARIEELEEELEAERTARAKVEKLRSDLSRELEEISERLEEAGGATSVQIEMNKKREAEFQKMRRDLEEATLQHEATAAALRKKHADSVAELGEQIDNLQRVKQKLEKEKSEFKLELDDVTSNMEQIIKAKANLEKVSRTLEDQANEYRVKLEEAQRSLNDFTTQRAKLQTENGELARQLEEKEALISQLTRGKLSYTQQMEDLKRQLEEEGKAKNALAHALQSARHDCDLLREQYEEETEAKAELQRVLSKANSEVAQWRTKYETDAIQRTEELEEAKKKLAQRLQDAEEAVEAVNAKCSSLEKTKHRLQNEIEDLMVDVERSNAAAAALDKKQRNFDKILAEWKQKYEESQSELESSQKEARSLSTELFKLKNAYEESLEHLETFKRENKNLQEEISDLTEQLGEGGKNVHELEKVRKQLEVEKLELQSALEEAEASLEHEEGKILRAQLEFNQIKAEIERKLAEKDEEMEQAKRNHQRVVDSLQTSLDAETRSRNEVLRVKKKMEGDLNEMEIQLSHANRMAAEAQKQVKSLQSLLKDTQIQLDDAVRANDDLKENIAIVERRNNLLQAELEELRAVVEQTERSRKLAEQELIETSERVQLLHSQNTSLINQKKKMESDLTQLQSEVEEAVQECRNAEEKAKKAITDAAMMAEELKKEQDTSAHLERMKKNMEQTIKDLQHRLDEAEQIALKGGKKQLQKLEARVRELEGELEAEQKRNAESVKGMRKSERRIKELTYQVRRTPDTGSRCGSFFSGPTAPPSQGSSHLLLEMLLVDLTFFSRSAVSLT

SEQ ID NO: 240 - protein, 1336 aa, Homo sapiens
MTDAQMADFGAAAQYLRKSEKERLEAQTRPFDIRTECFVPDDKEEFVKAKILSREGGKVIAETENGKTVTVKEDQVLQQNPPKFDKIEDMAMLTFLHEPAVLFNLKERYAAWMIYTYSGLFCVTVNPYKWLPVYNAEVVAAYRGKKRSEAPPHIFSISDNAYQYMLTDRENQSILITGESGAGKTVNTKRVIQYFASIAAIGDRGKKDNANANKGTLEDQIIQANPALEAFGNAKTVRNDNSSRFGKFIRIHFGATGKLASADIETYLLEKSRVIFQLKAERNYHIFYQILSNKKPELLDMLLVTNNPYDYAFVSQGEVSVASIDDSEELMATDSAFDVLGFTSEEKAGVYKLTGAIMHYGNMKFKQKQREEQAEPDGTEDADKSAYLMGLNSADLLKGLCHPRVKVGNEYVTKGQSVQQVYYSIGALAKAVYEKMFNWMVTRINATLETKQPRQYFIGVLDIAGFEIFDFNSFEQLCINFTNEKLQQFFNHHMFVLEQEEYKKEGIEWTFIDFGMDLQACIDLIEKPMGIMSILEEECMFPKATDMTFKAKLYDNHLGKSNNFQKPRNIKGKQEAHFSLIHYAGTVDYNILGWLEKNKDPLNETVVALYQKSSLKLMATLFSSYATADTGDSGKSKGGKKKGSSFQTVSALHRENLNKLMTNLRTTHPHFVRCIIPNERKAPGVMDNPLVMHQLRCNGVLEGIRICRKGFPNRILYGDFRQRYRILNPVAIPEGQFIDSRKGTEKLLSSLDIDHNQYKFGHTKVFFKAGLLGLLEEMRDERLSRIITRMQAQARGQLMRIEFKKIVERRDALLVIQWNIRAFMGVKNWPWMKLYFKIKPLLKSAETEKEMATMKEEFGRIKETLEKSEARRKELEEKMVSLLQEKNDLQLQVQAEQDNLNDAEERCDQLIKNKIQLEAKVKEMNERLEDEEEMNAELTAKKRKLEDECSELKKDIDDLELTLAKVEKEKHATENKVKNLTEEMAGLDEIIAKLTKEKKALQEAHQQALDDLQVEEDKVNSLSKSKVKLEQQVDDLEGSLEQEKKVRMDLERAKRKLEGDLKLTQESIMDLENDKLQLEEKLKKKEFDINQQNSKIEDEQALALQLQKKLKENQARIEELEEELEAERTARAKVEKLRSDLSRELEEISERLEEAGGATSVQIEMNKKREAEFQKMRRDLEEATLQHEATAAALRKKHADSVAELGEQIDNLQRVKQKLEKEKSEFKLELDDVTSNMEQIIKAKANLEKVSRTLEDQANEYRVKLEEAQRSLNDFTTQRAKLQTENGELARQLEEKEALISQLTRGKLSYTQQMEDLKRQLEEEGKVRPSGEGGQA

SEQ ID NO: 241 - protein, 1534 aa, Homo sapiens
MTDAQMADFGAAAQYLRKSEKERLEAQTRPFDIRTECFVPDDKEEFVKAKILSREGGKVIAETENGKTVTVKEDQVLQQNPPKFDKIEDMAMLTFLHEPAVLFNLKERYAAWMIYTYSGLFCVTVNPYKWLPVYNAEVVAAYRGKKRSEAPPHIFSISDNAYQYMLTDRENQSILITGESGAGKTVNTKRVIQYFASIAAIGDRGKKDNANANKGTLEDQIIQANPALEAFGNAKTVRNDNSSRFGKFIRIHFGATGKLASADIETYLLEKSRVIFQLKAERNYHIFYQILSNKKPELLDMLLVTNNPYDYAFVSQGEVSVASIDDSEELMATDSAFDVLGFTSEEKAGVYKLTGAIMHYGNMKFKQKQREEQAEPDGTEDADKSAYLMGLNSADLLKGLCHPRVKVGNEYVTKGQSVQQVYYSIGALAKAVYEKMFNWMVTRINATLETKQPRQYFIGVLDIAGFEIFDFNSFEQLCINFTNEKLQQFFNHHMFVLEQEEYKKEGIEWTFIDFGMDLQACIDLIEKPMGIMSILEEECMFPKATDMTFKAKLYDNHLGKSNNFQKPRNIKGKQEAHFSLIHYAGTVDYNILGWLEKNKDPLNETVVALYQKSSLKLMATLFSSYATADTGDSGKSKGGKKKGSSFQTVSALHRENLNKLMTNLRTTHPHFVRCIIPNERKAPGVMDNPLVMHQLRCNGVLEGIRICRKGFPNRILYGDFRQRYRILNPVAIPEGQFIDSRKGTEKLLSSLDIDHNQYKFGHTKVFFKAGLLGLLEEMRDERLSRIITRMQAQARGQLMRIEFKKIVERRDALLVIQWNIRAFMGVKNWPWMKLYFKIKPLLKSAETEKEMATMKEEFGRIKETLEKSEARRKELEEKMVSLLQEKNDLQLQVQAEQDNLNDAEERCDQLIKNKIQLEAKVKEMNERLEDEEEMNAELTAKKRKLEDECSELKKDIDDLELTLAKVEKEKHATENKVKNLTEEMAGLDEIIAKLTKEKKALQEAHQQALDDLQVEEDKVNSLSKSKVKLEQQVDDLEGSLEQEKKVRMDLERAKRKLEGDLKLTQESIMDLENDKLQLEEKLKKKEFDINQQNSKIEDEQALALQLQKKLKENQARIEELEEELEAERTARAKVEKLRSDLSRELEEISERLEEAGGATSVQIEMNKKREAEFQKMRRDLEEATLQHEATAAALRKKHADSVAELGEQIDNLQRVKQKLEKEKSEFKLELDDVTSNMEQIIKAKANLEKVSRTLEDQANEYRVKLEEAQRSLNDFTTQRAKLQTENGELARQLEEKEALISQLTRGKLSYTQQMEDLKRQLEEEGKAKNALAHALQSARHDCDLLREQYEEETEAKAELQRVLSKANSEVAQWRTKYETDAIQRTEELEEAKKKLAQRLQDAEEAVEAVNAKCSSLEKTKHRLQNEIEDLMVDVERSNAAAAALDKKQRNFDKILAEWKQKYEESQSELESSQKEARSLSTELFKLKNAYEESLEHLETFKRENKNLQGVLGVQEARDELVGGRAMQGQGEHRL

SEQ ID NO: 242 - protein, 1788 aa, Homo sapiens
MTDAQMADFGAAAQYLRKSEKERLEAQTRPFDIRTECFVPDDKEEFVKAKILSREGGKVIAETENGKTVTVKEDQVLQQNPPKFDKIEDMAMLTFLHEPAVLFNLKERYAAWMIYTYSGLFCVTVNPYKWLPVYNAEVVAAYRGKKRSEAPPHIFSISDNAYQYMLTDRENQSILITGESGAGKTVNTKRVIQYFASIAAIGDRGKKDNANANKGTLEDQIIQANPALEAFGNAKTVRNDNSSRFGKFIRIHFGATGKLASADIETYLLEKSRVIFQLKAERNYHIFYQILSNKKPELLDMLLVTNNPYDYAFVSQGEVSVASIDDSEELMATDSAFDVLGFTSEEKAGVYKLTGAIMHYGNMKFKQKQREEQAEPDGTEDADKSAYLMGLNSADLLKGLCHPRVKVGNEYVTKGQSVQQVYYSIGALAKAVYEKMFNWMVTRINATLETKQPRQYFIGVLDIAGFEIFDFNSFEQLCINFTNEKLQQFFNHHMFVLEQEEYKKEGIEWTFIDFGMDLQACIDLIEKPMGIMSILEEECMFPKATDMTFKAKLYDNHLGKSNNFQKPRNIKGKQEAHFSLIHYAGTVDYNILGWLEKNKDPLNETVVALYQKSSLKLMATLFSSYATADTGDSGKSKGGKKKGSSFQTVSALHRENLNKLMTNLRTTHPHFVRCIIPNERKAPGVMDNPLVMHQLRCNGVLEGIRICRKGFPNRILYGDFRQRYRILNPVAIPEGQFIDSRKGTEKLLSSLDIDHNQYKFGHTKVFFKAGLLGLLEEMRDERLSRIITRMQAQARGQLMRIEFKKIVERRDALLVIQWNIRAFMGVKNWPWMKLYFKIKPLLKSAETEKEMATMKEEFGRIKETLEKSEARRKELEEKMVSLLQEKNDLQLQVQAEQDNLNDAEERCDQLIKNKIQLEAKVKEMNERLEDEEEMNAELTAKKRKLEDECSELKKDIDDLELTLAKVEKEKHATENKVKNLTEEMAGLDEIIAKLTKEKKALQEAHQQALDDLQVEEDKVNSLSKSKVKLEQQVDDLEGSLEQEKKVRMDLERAKRKLEGDLKLTQESIMDLENDKLQLEEKLKKKEFDINQQNSKIEDEQALALQLQKKLKENQARIEELEEELEAERTARAKVEKLRSDLSRELEEISERLEEAGGATSVQIEMNKKREAEFQKMRRDLEEATLQHEATAAALRKKHADSVAELGEQIDNLQRVKQKLEKEKSEFKLELDDVTSNMEQIIKAKANLEKVSRTLEDQANEYRVKLEEAQRSLNDFTTQRAKLQTENGELARQLEEKEALISQLTRGKLSYTQQMEDLKRQLEEEGKAKNALAHALQSARHDCDLLREQYEEETEAKAELQRVLSKANSEVAQWRTKYETDAIQRTEELEEAKKKLAQRLQDAEEAVEAVNAKCSSLEKTKHRLQNEIEDLMVDVERSNAAAAALDKKQRNFDKILAEWKQKYEESQSELESSQKEARSLSTELFKLKNAYEESLEHLETFKRENKNLQEEISDLTEQLGEGGKNVHELEKVRKQLEVEKLELQSALEEAEASLEHEEGKILRAQLEFNQIKAEIERKLAEKDEEMEQAKRNHQRVVDSLQTSLDAETRSRNEVLRVKKKMEGDLNEMEIQLSHANRMAAEAQKQVKSLQSLLKDTQIQLDDAVRANDDLKENIAIVERRNNLLQAELEELRAVVEQTERSRKLAEQELIETSERVQLLHSQNTSLINQKKKMESDLTQLQSEVEEAVQECRNAEEKAKKAITDVSDRPPSASPKDRNKALGPGQATVL

SEQ ID NO: 243 - protein, 1434 aa, Homo sapiens
MGLWKPGSVLSDSLFASSPCPQPMGIMSILEEECMFPKATDMTFKAKLYDNHLGKSNNFQKPRNIKGKQEAHFSLIHYAGTVDYNILGWLEKNKDPLNETVVALYQKSSLKLMATLFSSYATADTGDSGKSKGGKKKGSSFQTVSALHRENLNKLMTNLRTTHPHFVRCIIPNERKAPGVMDNPLVMHQLRCNGVLEGIRICRKGFPNRILYGDFRQRYRILNPVAIPEGQFIDSRKGTEKLLSSLDIDHNQYKFGHTKVFFKAGLLGLLEEMRDERLSRIITRMQAQARGQLMRIEFKKIVERRDALLVIQWNIRAFMGVKNWPWMKLYFKIKPLLKSAETEKEMATMKEEFGRIKETLEKSEARRKELEEKMVSLLQEKNDLQLQVQAEQDNLNDAEERCDQLIKNKIQLEAKVKEMNERLEDEEEMNAELTAKKRKLEDECSELKKDIDDLELTLAKVEKEKHATENKVKNLTEEMAGLDEIIAKLTKEKKALQEAHQQALDDLQVEEDKVNSLSKSKVKLEQQVDDLEGSLEQEKKVRMDLERAKRKLEGDLKLTQESIMDLENDKLQLEEKLKKKEFDINQQNSKIEDEQALALQLQKKLKENQARIEELEEELEAERTARAKVEKLRSDLSRELEEISERLEEAGGATSVQIEMNKKREAEFQKMRRDLEEATLQHEATAAALRKKHADSVAELGEQIDNLQRVKQKLEKEKSEFKLELDDVTSNMEQIIKAKANLEKVSRTLEDQANEYRVKLEEAQRSLNDFTTQRAKLQTENGELARQLEEKEALISQLTRGKLSYTQQMEDLKRQLEEEGKAKNALAHALQSARHDCDLLREQYEEETEAKAELQRVLSKANSEVAQWRTKYETDAIQRTEELEEAKKKLAQRLQDAEEAVEAVNAKCSSLEKTKHRLQNEIEDLMVDVERSNAAAAALDKKQRNFDKILAEWKQKYEESQSELESSQKEARSLSTELFKLKNAYEESLEHLETFKRENKNLQEEISDLTEQLGEGGKNVHELEKVRKQLEVEKLELQSALEEAEASLEHEEGKILRAQLEFNQIKAEIERKLAEKDEEMEQAKRNHQRVVDSLQTSLDAETRSRNEVLRVKKKMEGDLNEMEIQLSHANRMAAEAQKQVKSLQSLLKDTQIQLDDAVRANDDLKENIAIVERRNNLLQAELEELRAVVEQTERSRKLAEQELIETSERVQLLHSQNTSLINQKKKMESDLTQLQSEVEEAVQECRNAEEKAKKAITDAAMMAEELKKEQDTSAHLERMKKNMEQTIKDLQHRLDEAEQIALKGGKKQLQKLEARVRELEGELEAEQKRNAESVKGMRKSERRIKELTYQTEEDKKNLLRLQDLVDKLQLKVKAYKRQAEEAEEQANTNLSKFRKVQHELDEAEERADIAESQVNKLRAKSRDIGAKQKMHDEE

SEQ ID NO: 244 - protein, 555 aa, Homo sapiens
MTDAQMADFGAAAQYLRKSEKERLEAQTRPFDIRTECFVPDDKEEFVKAKILSREGGKVIAETENGKTVTVKEDQVLQQNPPKFDKIEDMAMLTFLHEPAVLFNLKERYAAWMIYTYSGLFCVTVNPYKWLPVYNAEVVAAYRGKKRSEAPPHIFSISDNAYQYMLTDRENQSILITGESGAGKTVNTKRVIQYFASIAAIGDRGKKDNANANKGTLEDQIIQANPALEAFGNAKTVRNDNSSRFGKFIRIHFGATGKLASADIETYLLEKSRVIFQLKAERNYHIFYQILSNKKPELLDMLLVTNNPYDYAFVSQGEVSVASIDDSEELMATDSAFDVLGFTSEEKAGVYKLTGAIMHYGNMKFKQKQREEQAEPDGTEDADKSAYLMGLNSADLLKGLCHPRVKVGNEYVTKGQSVQQVYYSIGALAKAVYEKMFNWMVTRINATLETKQPRQYFIGVLDIAGFEIFDFNSFEQLCINFTNEKLQQFFNHHMFVLEQEEYKKEGIEWTFIDFGMDLQACIDLIEKVPPWPHHLCPLLCHPDKVVAESLLHPRN

SEQ ID NO: 245 - DNA, 17 bp, Artificial sequence
  Synthetic oligonucleotide
ccgccatgatggcagag

SEQ ID NO: 246 - DNA, 17 bp, Artificial sequence
  Synthetic oligonucleotide
ccggtgctgcaggtcct

SEQ ID NO: 247 - DNA, 104 bp, Artificial sequence
  Synthetic oligonucleotide
ccgccatgatggcagaggagctgaagaaggagcaggacaccagcgcccacctggagcgcatgaagaagaacatggagcagaccattaaggacctgcagcaccgg

SEQ ID NO: 248 - DNA, 20 bp, Artificial sequence
  Synthetic oligonucleotide
ctttctccaggcccagcttc

SEQ ID NO: 249 - DNA, 20 bp, Artificial sequence
  Synthetic oligonucleotide
aaagtgcaaggtcctgggaa

SEQ ID NO: 250 - DNA, 91 bp, Artificial sequence
  Synthetic oligonucleotide
ctttctccaggcccagcttctccccactgtgaagtcatgggcatgaacaggatgatccccccactcttcctttcccaggaccttgcacttt

SEQ ID NO: 251 - DNA, 1683 bp, Homo sapiens
ggaggtagctggaaggcaagagatctaggacttctagcccctgaactttcagccgaatacatcttttccaaaggagtgaattcaggcccttgtatcactggcagcaggacgtgaccatggagaagctgttgtgtttcttggtcttgaccagcctctctcatgcttttggccagacagacatgtcgaggaaggcttttgtgtttcccaaagagtcggatacttcctatgtatccctcaaagcaccgttaacgaagcctctcaaagccttcactgtgtgcctccacttctacacggaactgtcctcgacccatgagattaacaccatctatcttggcgggcccttcagtcctaatgtcctgaactggcgggcactgaagtatgaagtgcaaggcgaagtgttcaccaaaccccagctgtggccctgaggcccagctgtgggtcctgaaggtacctcccggttttttacaccgcatgggccccacgtctctgtctctggtacctcccgcttttttacactgcatggttcccacgtctctgtctctgggcctttgttcccctatatgcattgcaggcctgctccaccctcctcagcgcctgagaatggaggtaaagtgtctggtctgggagctcgttaactatgctgggaaacggtccaaaagaatcagaatttgaggtgttttgttttcatttttatttcaagttggacagatcttggagataatttcttacctcacatagatgagaaaactaacacccagaaaggagaaatgatgttataaaaaactcataaggcaagagctgagaaggaagcgctgatcttctatttaattccccacccatgacccccagaaagcaggagggcattgcccacattcacagggctcttcagtctcagaatcaggacactggccaggtgtctggtttgggtccagagtgctcatcatcatgtcatagaactgctgggcccaggtctcctgaaatgggaagcccagcaataccacgcagtccctccactttctcaaagcacactggaaaggccattagaattgccccagcagagcagatctgctttttttccagagcaaaatgaagcactaggtataaatatgttgttactgccaagaacttaaatgactggtttttgtttgcttgcagtgctttcttaattttatggctcttctgggaaactcctccccttttccacacgaaccttgtggggctgtgaattctttcttcatccccgcattcccaatatacccaggccacaagagtggacgtgaaccacagggtgtcctgtcagaggagcccatctcccatctccccagctccctatctggaggatagttggatagttacgtgttcctagcaggaccaactacagtcttcccaaggattgagttatggactttgggagtgagacatcttcttgctgctggatttccaagctgagaggacgtgaacctgggaccaccagtagccatcttgtttgccacatggagagagactgtgaggacagaagccaaactggaagtggaggagccaagggattgacaaacaacagagccttgaccacgtggagtctctgaatcagccttgtctggaaccagatctacacctggactgcccaggtctataagccaataaagcccctgtttacttgagtgagtccaagctgttttctga

SEQ ID NO: 252 - DNA, 1687 bp, Homo sapiens
ggaggtagctggaaggcaagagatctaggacttctagcccctgaactttcagccgaatacatcttttccaaaggagtgaattcaggcccttgtatcactggcagcaggacgtgaccatggagaagctgttgtgtttcttggtcttgaccagcctctctcatgcttttggccagacagacatgtcgaggaaggcttttgtgtttcccaaagagtcggatacttcctatgtatccctcaaagcaccgttaacgaagcctctcaaagccttcactgtgtgcctccacttctacacggaactgtcctcgacccgtggatgagattaacaccatctatcttggcgggcccttcagtcctaatgtcctgaactggcgggcactgaagtatgaagtgcaaggcgaagtgttcaccaaaccccagctgtggccctgaggcccagctgtgggtcctgaaggtacctcccggttttttacaccgcatgggccccacgtctctgtctctggtacctcccgcttttttacactgcatggttcccacgtctctgtctctgggcctttgttcccctatatgcattgcaggcctgctccaccctcctcagcgcctgagaatggaggtaaagtgtctggtctgggagctcgttaactatgctgggaaacggtccaaaagaatcagaatttgaggtgttttgttttcatttttatttcaagttggacagatcttggagataatttcttacctcacatagatgagaaaactaacacccagaaaggagaaatgatgttataaaaaactcataaggcaagagctgagaaggaagcgctgatcttctatttaattccccacccatgacccccagaaagcaggagggcattgcccacattcacagggctcttcagtctcagaatcaggacactggccaggtgtctggtttgggtccagagtgctcatcatcatgtcatagaactgctgggcccaggtctcctgaaatgggaagcccagcaataccacgcagtccctccactttctcaaagcacactggaaaggccattagaattgccccagcagagcagatctgctttttttccagagcaaaatgaagcactaggtataaatatgttgttactgccaagaacttaaatgactggtttttgtttgcttgcagtgctttcttaattttatggctcttctgggaaactcctccccttttccacacgaaccttgtggggctgtgaattctttcttcatccccgcattcccaatatacccaggccacaagagtggacgtgaaccacagggtgtcctgtcagaggagcccatctcccatctccccagctccctatctggaggatagttggatagttacgtgttcctagcaggaccaactacagtcttcccaaggattgagttatggactttgggagtgagacatcttcttgctgctggatttccaagctgagaggacgtgaacctgggaccaccagtagccatcttgtttgccacatggagagagactgtgaggacagaagccaaactggaagtggaggagccaagggattgacaaacaacagagccttgaccacgtggagtctctgaatcagccttgtctggaaccagatctacacctggactgcccaggtctataagccaataaagcccctgtttacttgagtgagtccaagctgttttctga

SEQ ID NO: 253 - DNA, 1650 bp, Homo sapiens
ggaggtagctggaaggcaagagatctaggacttctagcccctgaactttcagccgaatacatcttttccaaaggagtgaattcaggcccttgtatcactggcagcaggacgtgaccatggagaagctgttgtgtttcttggtcttgaccagcctctctcatgcttttggccagacagacatgtcgaggaaggcttttgtgtttcccaaagagtcggatacttcctatgtatccctcaaagcaccgttaacgaagcctctcaaagccttcactgtgtgcctccacttctacacggaactgtcctcgacccgtggtcctaatgtcctgaactggcgggcactgaagtatgaagtgcaaggcgaagtgttcaccaaaccccagctgtggccctgaggcccagctgtgggtcctgaaggtacctcccggttttttacaccgcatgggccccacgtctctgtctctggtacctcccgcttttttacactgcatggttcccacgtctctgtctctgggcctttgttcccctatatgcattgcaggcctgctccaccctcctcagcgcctgagaatggaggtaaagtgtctggtctgggagctcgttaactatgctgggaaacggtccaaaagaatcagaatttgaggtgttttgttttcatttttatttcaagttggacagatcttggagataatttcttacctcacatagatgagaaaactaacacccagaaaggagaaatgatgttataaaaaactcataaggcaagagctgagaaggaagcgctgatcttctatttaattccccacccatgacccccagaaagcaggagggcattgcccacattcacagggctcttcagtctcagaatcaggacactggccaggtgtctggtttgggtccagagtgctcatcatcatgtcatagaactgctgggcccaggtctcctgaaatgggaagcccagcaataccacgcagtccctccactttctcaaagcacactggaaaggccattagaattgccccagcagagcagatctgctttttttccagagcaaaatgaagcactaggtataaatatgttgttactgccaagaacttaaatgactggtttttgtttgcttgcagtgctttcttaattttatggctcttctgggaaactcctccccttttccacacgaaccttgtggggctgtgaattctttcttcatccccgcattcccaatatacccaggccacaagagtggacgtgaaccacagggtgtcctgtcagaggagcccatctcccatctccccagctccctatctggaggatagttggatagttacgtgttcctagcaggaccaactacagtcttcccaaggattgagttatggactttgggagtgagacatcttcttgctgctggatttccaagctgagaggacgtgaacctgggaccaccagtagccatcttgtttgccacatggagagagactgtgaggacagaagccaaactggaagtggaggagccaagggattgacaaacaacagagccttgaccacgtggagtctctgaatcagccttgtctggaaccagatctacacctggactgcccaggtctataagccaataaagcccctgtttacttgagtgagtccaagctgttttctga

SEQ ID NO: 254 - DNA, 1391 bp, Homo sapiens
ggaggtagctggaaggcaagagatctaggacttctagcccctgaactttcagccgaatacatcttttccaaaggagtgaattcaggcccttgtatcactggcagcaggacgtgaccatggagaagctgttgtgtttcttggtcttgaccagcctctctcatgcttttggccagacagacatgtcgaggaaggcttttgtgtttcccaaagagtcggatacttcctatgtatccctcaaagcaccgttaacgaagcctctcaaagccttcactgtgtgcctccacttctacacggaactgtcctcgacccgtgggtacagtattttctcgtatgccaccaagagacaagacaatgagattctcatattttggtctaaggatataggatacagttttacagtgggtgggtctgaaatattattcgaggttcctgaagtcacagtagctccagtacacatttgtacaagctgggagtccgcctcagggatcgtggagttctgggtagatgggaagcccagggtgaggaagagtctgaagaagggatacactgtgggggcagaagcaagcatcatcttggggcaggagcaggattccttcgtctcagaatcaggacactggccaggtgtctggtttgggtccagagtgctcatcatcatgtcatagaactgctgggcccaggtctcctgaaatgggaagcccagcaataccacgcagtccctccactttctcaaagcacactggaaaggccattagaattgccccagcagagcagatctgctttttttccagagcaaaatgaagcactaggtataaatatgttgttactgccaagaacttaaatgactggtttttgtttgcttgcagtgctttcttaattttatggctcttctgggaaactcctccccttttccacacgaaccttgtggggctgtgaattctttcttcatccccgcattcccaatatacccaggccacaagagtggacgtgaaccacagggtgtcctgtcagaggagcccatctcccatctccccagctccctatctggaggatagttggatagttacgtgttcctagcaggaccaactacagtcttcccaaggattgagttatggactttgggagtgagacatcttcttgctgctggatttccaagctgagaggacgtgaacctgggaccaccagtagccatcttgtttgccacatggagagagactgtgaggacagaagccaaactggaagtggaggagccaagggattgacaaacaacagagccttgaccacgtggagtctctgaatcagccttgtctggaaccagatctacacctggactgcccaggtctataagccaataaagcccctgtttacttgagtgagtccaagctgttttctga

SEQ ID NO: 255 - DNA, 841 bp, Homo sapiens
ggaggtagctggaaggcaagagatctaggacttctagcccctgaactttcagccgaatacatcttttccaaaggagtgaattcaggcccttgtatcactggcagcaggacgtgaccatggagaagctgttgtgtttcttggtcttgaccagcctctctcatgcttttggccagacagacatgtcgaggaaggcttttgtgtttcccaaagagtcggatacttcctatgtatccctcaaagcaccgttaacgaagcctctcaaagccttcactgtgtgcctccacttctacacggaactgtcctcgacccgtggtgctttcttaattttatggctcttctgggaaactcctccccttttccacacgaaccttgtggggctgtgaattctttcttcatccccgcattcccaatatacccaggccacaagagtggacgtgaaccacagggtgtcctgtcagaggagcccatctcccatctccccagctccctatctggaggatagttggatagttacgtgttcctagcaggaccaactacagtcttcccaaggattgagttatggactttgggagtgagacatcttcttgctgctggatttccaagctgagaggacgtgaacctgggaccaccagtagccatcttgtttgccacatggagagagactgtgaggacagaagccaaactggaagtggaggagccaagggattgacaaacaacagagccttgaccacgtggagtctctgaatcagccttgtctggaaccagatctacacctggactgcccaggtctataagccaataaagcccctgtttacttgagtgagtccaagctgttttctga

SEQ ID NO: 256 - DNA, 942 bp, Homo sapiens
ggaggtagctggaaggcaagagatctaggacttctagcccctgaactttcagccgaatacatcttttccaaaggagtgaattcaggcccttgtatcactggcagcaggacgtgaccatggagaagctgttgtgtttcttggtcttgaccagcctctctcatgcttttggccagacagacatgtcgaggaaggcttttgtgtttcccaaagagtcggatacttcctatgtatccctcaaagcaccgttaacgaagcctctcaaagccttcactgtgtgcctccacttctacacggaactgtcctcgacccgtggtcctaatgtcctgaactggcgggcactgaagtatgaagtgcaaggcgaagtgttcaccaaaccccagctgtggccctgaggcccagctgtgggtcctgaagtgctttcttaattttatggctcttctgggaaactcctccccttttccacacgaaccttgtggggctgtgaattctttcttcatccccgcattcccaatatacccaggccacaagagtggacgtgaaccacagggtgtcctgtcagaggagcccatctcccatctccccagctccctatctggaggatagttggatagttacgtgttcctagcaggaccaactacagtcttcccaaggattgagttatggactttgggagtgagacatcttcttgctgctggatttccaagctgagaggacgtgaacctgggaccaccagtagccatcttgtttgccacatggagagagactgtgaggacagaagccaaactggaagtggaggagccaagggattgacaaacaacagagccttgaccacgtggagtctctgaatcagccttgtctggaaccagatctacacctggactgcccaggtctataagccaataaagcccctgtttacttgagtgagtccaagctgttttctga

SEQ ID NO: 257 - DNA, 975 bp, Homo sapiens
ggaggtagctggaaggcaagagatctaggacttctagcccctgaactttcagccgaatacatcttttccaaaggagtgaattcaggcccttgtatcactggcagcaggacgtgaccatggagaagctgttgtgtttcttggtcttgaccagcctctctcatgcttttggccagacagacatgtcgaggaaggcttttgtgtttcccaaagagtcggatacttcctatgtatccctcaaagcaccgttaacgaagcctctcaaagccttcactgtgtgcctccacttctacacggaactgtcctcgacccatgagattaacaccatctatcttggcgggcccttcagtcctaatgtcctgaactggcgggcactgaagtatgaagtgcaaggcgaagtgttcaccaaaccccagctgtggccctgaggcccagctgtgggtcctgaagtgctttcttaattttatggctcttctgggaaactcctccccttttccacacgaaccttgtggggctgtgaattctttcttcatccccgcattcccaatatacccaggccacaagagtggacgtgaaccacagggtgtcctgtcagaggagcccatctcccatctccccagctccctatctggaggatagttggatagttacgtgttcctagcaggaccaactacagtcttcccaaggattgagttatggactttgggagtgagacatcttcttgctgctggatttccaagctgagaggacgtgaacctgggaccaccagtagccatcttgtttgccacatggagagagactgtgaggacagaagccaaactggaagtggaggagccaagggattgacaaacaacagagccttgaccacgtggagtctctgaatcagccttgtctggaaccagatctacacctggactgcccaggtctataagccaataaagcccctgtttacttgagtgagtccaagctgttttctga

SEQ ID NO: 258 - DNA, 837 bp, Homo sapiens
ggaggtagctggaaggcaagagatctaggacttctagcccctgaactttcagccgaatacatcttttccaaaggagtgaattcaggcccttgtatcactggcagcaggacgtgaccatggagaagctgttgtgtttcttggtcttgaccagcctctctcatgcttttggccagacagacatgtcgaggaaggcttttgtgtttcccaaagagtcggatacttcctatgtatccctcaaagcaccgttaacgaagcctctcaaagccttcactgtgtgcctccacttctacacggaactgtcctcgaccctgctttcttaattttatggctcttctgggaaactcctccccttttccacacgaaccttgtggggctgtgaattctttcttcatccccgcattcccaatatacccaggccacaagagtggacgtgaaccacagggtgtcctgtcagaggagcccatctcccatctccccagctccctatctggaggatagttggatagttacgtgttcctagcaggaccaactacagtcttcccaaggattgagttatggactttgggagtgagacatcttcttgctgctggatttccaagctgagaggacgtgaacctgggaccaccagtagccatcttgtttgccacatggagagagactgtgaggacagaagccaaactggaagtggaggagccaagggattgacaaacaacagagccttgaccacgtggagtctctgaatcagccttgtctggaaccagatctacacctggactgcccaggtctataagccaataaagcccctgtttacttgagtgagtccaagctgttttctga

SEQ ID NO: 259 - DNA, 716 bp, Homo sapiens
ggaggtagctggaaggcaagagatctaggacttctagcccctgaactttcagccgaatacatcttttccaaaggagtgaattcaggcccttgtatcactggcagcaggacgtgaccatggagaagctgttgtgtttcttggtcttgaccagcctctctcatgcttttggccagacagacatgtcgaggaaggcttttgtgtttcccaaagagtcggatacttcctatgtatccctcaaagcaccgttaacgaagcctctcaaagccttcactgtgtgcctccacttctacacggaactgtcctcgacccgtggtcctaatgtcctgaactggcgggcactgaagtatgaagtgcaaggcgaagtgttcaccaaaccccagctgtggccctgaggcccagctgtgggtcctgaagtcttcccaaggattgagttatggactttgggagtgagacatcttcttgctgctggatttccaagctgagaggacgtgaacctgggaccaccagtagccatcttgtttgccacatggagagagactgtgaggacagaagccaaactggaagtggaggagccaagggattgacaaacaacagagccttgaccacgtggagtctctgaatcagccttgtctggaaccagatctacacctggactgcccaggtctataagccaataaagcccctgtttacttgagtgagtccaagctgttttctga

SEQ ID NO: 260 - DNA, 761 bp, Homo sapiens
ggaggtagctggaaggcaagagatctaggacttctagcccctgaactttcagccgaatacatcttttccaaaggagtgaattcaggcccttgtatcactggcagcaggacgtgaccatggagaagctgttgtgtttcttggtcttgaccagcctctctcatgcttttggccagacagacatgtcgaggaaggcttttgtgtttcccaaagagtcggatacttcctatgtatccctcaaagcaccgttaacgaagcctctcaaagccttcactgtgtgcctccacttctacacggaactgtcctcgacccatgagattaacaccatctatcttggcgggcccttcagtcctaatgtcctgaactggcgggcactgaagtatgaagtgcaaggcgaagtgttcaccaaaccccagctgtggccctgaggcccagctgtgggtcctgaaggaccaactacagtcttcccaaggattgagttatggactttgggagtgagacatcttcttgctgctggatttccaagctgagaggacgtgaacctgggaccaccagtagccatcttgtttgccacatggagagagactgtgaggacagaagccaaactggaagtggaggagccaagggattgacaaacaacagagccttgaccacgtggagtctctgaatcagccttgtctggaaccagatctacacctggactgcccaggtctataagccaataaagcccctgtttacttgagtgagtccaagctgttttctga

SEQ ID NO: 261 - DNA, 137 bp, Artificial sequence
  Synthetic oligonucleotide
ctgagaggacgtgaacctgggaccaccagtagccatcttgtttgccacatggagagagactgtgaggacagaagccaaactggaagtggaggagccaagggattgacaaacaacagagccttgaccacgtggagtct

SEQ ID NO: 262 - DNA, 75 bp, Artificial sequence
  Synthetic oligonucleotide
ggaggtagctggaaggcaagagatctaggacttctagcccctgaactttcagccgaatacatcttttccaaagga

SEQ ID NO: 263 - DNA, 29 bp, Artificial sequence
  Synthetic oligonucleotide
gtgaattcaggcccttgtatcactggcag

SEQ ID NO: 264 - DNA, 6 bp, Artificial sequence
  Synthetic oligonucleotide
caggac

SEQ ID NO: 265 - DNA, 67 bp, Artificial sequence
  Synthetic oligonucleotide
gtgaccatggagaagctgttgtgtttcttggtcttgaccagcctctctcatgcttttggccagacag

SEQ ID NO: 266 - DNA, 73 bp, Artificial sequence
  Synthetic oligonucleotide
acatgtcgaggaaggcttttgtgtttcccaaagagtcggatacttcctatgtatccctcaaagcaccgttaac

SEQ ID NO: 267 - DNA, 5 bp, Artificial sequence
  Synthetic oligonucleotide
gaagc

SEQ ID NO: 268 - DNA, 28 bp, Artificial sequence
  Synthetic oligonucleotide
ctctcaaagccttcactgtgtgcctcca

SEQ ID NO: 269 - DNA, 26 bp, Artificial sequence
  Synthetic oligonucleotide
cttctacacggaactgtcctcgaccc

SEQ ID NO: 270 - DNA, 4 bp, Artificial sequence
  Synthetic oligonucleotide
gtgg

SEQ ID NO: 271 - DNA, 32 bp, Artificial sequence
  Synthetic oligonucleotide
gtacagtattttctcgtatgccaccaagagac

SEQ ID NO: 272 - DNA, 6 bp, Artificial sequence
  Synthetic oligonucleotide
aagaca

SEQ ID NO: 273 - DNA, 33 bp, Artificial sequence
  Synthetic oligonucleotide
atgagattctcatattttggtctaaggatatag

SEQ ID NO: 274 - DNA, 45 bp, Artificial sequence
  Synthetic oligonucleotide
gatacagttttacagtgggtgggtctgaaatattattcgaggttc

SEQ ID NO: 275 - DNA, 20 bp, Artificial sequence
  Synthetic oligonucleotide
ctgaagtcacagtagctcca

SEQ ID NO: 276 - DNA, 19 bp, Artificial sequence
  Synthetic oligonucleotide
gtacacatttgtacaagct

SEQ ID NO: 277 - DNA, 15 bp, Artificial sequence
  Synthetic oligonucleotide
gggagtccgcctcag

SEQ ID NO: 278 - DNA, 35 bp, Artificial sequence
  Synthetic oligonucleotide
ggatcgtggagttctgggtagatgggaagcccagg

SEQ ID NO: 279 - DNA, 12 bp, Artificial sequence
  Synthetic oligonucleotide
gtgaggaagagt

SEQ ID NO: 280 - DNA, 30 bp, Artificial sequence
  Synthetic oligonucleotide
ctgaagaagggatacactgtgggggcagaa

SEQ ID NO: 281 - DNA, 11 bp, Artificial sequence
  Synthetic oligonucleotide
gcaagcatcat

SEQ ID NO: 282 - DNA, 26 bp, Artificial sequence
  Synthetic oligonucleotide
cttggggcaggagcaggattccttcg

SEQ ID NO: 283 - DNA, 37 bp, Artificial sequence
  Synthetic oligonucleotide
atgagattaacaccatctatcttggcgggcccttcag

SEQ ID NO: 284 - DNA, 31 bp, Artificial sequence
  Synthetic oligonucleotide
tcctaatgtcctgaactggcgggcactgaag

SEQ ID NO: 285 - DNA, 19 bp, Artificial sequence
  Synthetic oligonucleotide
tatgaagtgcaaggcgaag

SEQ ID NO: 286 - DNA, 25 bp, Artificial sequence
  Synthetic oligonucleotide
tgttcaccaaaccccagctgtggcc

SEQ ID NO: 287 - DNA, 11 bp, Artificial sequence
  Synthetic oligonucleotide
ctgaggcccag

SEQ ID NO: 288 - DNA, 15 bp, Artificial sequence
  Synthetic oligonucleotide
ctgtgggtcctgaag

SEQ ID NO: 289 - DNA, 39 bp, Artificial sequence
  Synthetic oligonucleotide
gtacctcccggttttttacaccgcatgggccccacgtct

SEQ ID NO: 290 - DNA, 58 bp, Artificial sequence
  Synthetic oligonucleotide
ctgtctctggtacctcccgcttttttacactgcatggttcccacgtctctgtctctgg

SEQ ID NO: 291 - DNA, 38 bp, Artificial sequence
  Synthetic oligonucleotide
gcctttgttcccctatatgcattgcaggcctgctccac

SEQ ID NO: 292 - DNA, 38 bp, Artificial sequence
  Synthetic oligonucleotide
cctcctcagcgcctgagaatggaggtaaagtgtctggt

SEQ ID NO: 293 - DNA, 16 bp, Artificial sequence
  Synthetic oligonucleotide
ctgggagctcgttaac

SEQ ID NO: 294 - DNA, 23 bp, Artificial sequence
  Synthetic oligonucleotide
tatgctgggaaacggtccaaaag

SEQ ID NO: 295 - DNA, 79 bp, Artificial sequence
  Synthetic oligonucleotide
aatcagaatttgaggtgttttgttttcatttttatttcaagttggacagatcttggagataatttcttacctcacatag

SEQ ID NO: 296 - DNA, 19 bp, Artificial sequence
  Synthetic oligonucleotide
atgagaaaactaacaccca

SEQ ID NO: 297 - DNA, 26 bp, Artificial sequence
  Synthetic oligonucleotide
gaaaggagaaatgatgttataaaaaa

SEQ ID NO: 298 - DNA, 53 bp, Artificial sequence
  Synthetic oligonucleotide
ctcataaggcaagagctgagaaggaagcgctgatcttctatttaattccccac

SEQ ID NO: 299 - DNA, 53 bp, Artificial sequence
  Synthetic oligonucleotide
ccatgacccccagaaagcaggagggcattgcccacattcacagggctcttcag

SEQ ID NO: 300 - DNA, 43 bp, Artificial sequence
  Synthetic oligonucleotide
tctcagaatcaggacactggccaggtgtctggtttgggtccag

SEQ ID NO: 301 - DNA, 37 bp, Artificial sequence
  Synthetic oligonucleotide
agtgctcatcatcatgtcatagaactgctgggcccag

SEQ ID NO: 302 - DNA, 23 bp, Artificial sequence
  Synthetic oligonucleotide
gtctcctgaaatgggaagcccag

SEQ ID NO: 303 - DNA, 25 bp, Artificial sequence
  Synthetic oligonucleotide
caataccacgcagtccctccacttt

SEQ ID NO: 304 - DNA, 60 bp, Artificial sequence
  Synthetic oligonucleotide
ctcaaagcacactggaaaggccattagaattgccccagcagagcagatctgctttttttc

SEQ ID NO: 305 - DNA, 78 bp, Artificial sequence
  Synthetic oligonucleotide
cagagcaaaatgaagcactaggtataaatatgttgttactgccaagaacttaaatgactggtttttgtttgcttgcag

SEQ ID NO: 306 - DNA, 28 bp, Artificial sequence
  Synthetic oligonucleotide
tgctttcttaattttatggctcttctgg

SEQ ID NO: 307 - DNA, 12 bp, Artificial sequence
  Synthetic oligonucleotide
gaaactcctccc

SEQ ID NO: 308 - DNA, 98 bp, Artificial sequence
  Synthetic oligonucleotide
cttttccacacgaaccttgtggggctgtgaattctttcttcatccccgcattcccaatatacccaggccacaagagtggacgtgaaccacagggtgtc

SEQ ID NO: 309 - DNA, 46 bp, Artificial sequence
  Synthetic oligonucleotide
ctgtcagaggagcccatctcccatctccccagctccctatctggag

SEQ ID NO: 310 - DNA, 30 bp, Artificial sequence
  Synthetic oligonucleotide
gatagttggatagttacgtgttcctagcag

SEQ ID NO: 311 - DNA, 12 bp, Artificial sequence
  Synthetic oligonucleotide
gaccaactacag

SEQ ID NO: 312 - DNA, 39 bp, Artificial sequence
  Synthetic oligonucleotide
tcttcccaaggattgagttatggactttgggagtgagac

SEQ ID NO: 313 - DNA, 11 bp, Artificial sequence
  Synthetic oligonucleotide
atcttcttgct

SEQ ID NO: 314 - DNA, 14 bp, Artificial sequence
  Synthetic oligonucleotide
gctggatttccaag

SEQ ID NO: 315 - DNA, 101 bp, Artificial sequence
  Synthetic oligonucleotide
ctgaatcagccttgtctggaaccagatctacacctggactgcccaggtctataagccaataaagcccctgtttacttgagtgagtccaagctgttttctga

SEQ ID NO: 316 - protein, 224 aa, Homo sapiens
MEKLLCFLVLTSLSHAFGQTDMSRKAFVFPKESDTSYVSLKAPLTKPLKAFTVCLHFYTELSSTRGYSIFSYATKRQDNEILIFWSKDIGYSFTVGGSEILFEVPEVTVAPVHICTSWESASGIVEFWVDGKPRVRKSLKKGYTVGAEASIILGQEQDSFGGNFEGSQSLVGDIGNVNMWDFVLSPDEINTIYLGGPFSPNVLNWRALKYEVQGEVFTKPQLWP

SEQ ID NO: 317 - protein, 102 aa, Homo sapiens
MEKLLCFLVLTSLSHAFGQTDMSRKAFVFPKESDTSYVSLKAPLTKPLKAFTVCLHFYTELSSTHEINTIYLGGPFSPNVLNWRALKYEVQGEVFTKPQLWP

SEQ ID NO: 318 - protein, 66 aa, Homo sapiens
MEKLLCFLVLTSLSHAFGQTDMSRKAFVFPKESDTSYVSLKAPLTKPLKAFTVCLHFYTELSSTRG

SEQ ID NO: 319 - protein, 91 aa, Homo sapiens
MEKLLCFLVLTSLSHAFGQTDMSRKAFVFPKESDTSYVSLKAPLTKPLKAFTVCLHFYTELSSTRGPNVLNWRALKYEVQGEVFTKPQLWP

SEQ ID NO: 320 - protein, 181 aa, Homo sapiens
MEKLLCFLVLTSLSHAFGQTDMSRKAFVFPKESDTSYVSLKAPLTKPLKAFTVCLHFYTELSSTRGYSIFSYATKRQDNEILIFWSKDIGYSFTVGGSEILFEVPEVTVAPVHICTSWESASGIVEFWVDGKPRVRKSLKKGYTVGAEASIILGQEQDSFVSESGHWPGVWFGSRVLIIMS

SEQ ID NO: 321 - protein, 88 aa, Homo sapiens
MEKLLCFLVLTSLSHAFGQTDMSRKAFVFPKESDTSYVSLKAPLTKPLKAFTVCLHFYTELSSTRGAFLILWLFWETPPLFHTNLVGL

SEQ ID NO: 322 - protein, 67 aa, Homo sapiens
MEKLLCFLVLTSLSHAFGQTDMSRKAFVFPKESDTSYVSLKAPLTKPLKAFTVCLHFYTELSSTLLS

SEQ ID NO: 323 - DNA, 21 bp, Artificial sequence
  Synthetic oligonucleotide
aactgtcctcgaccctgcttt

SEQ ID NO: 324 - DNA, 20 bp, Artificial sequence
  Synthetic oligonucleotide
gtggcctgggtatattggga

SEQ ID NO: 325 - DNA, 126 bp, Artificial sequence
  Synthetic oligonucleotide
aactgtcctcgaccctgctttcttaattttatggctcttctgggaaactcctccccttttccacacgaaccttgtggggctgtgaattctttcttcatccccgcattcccaatatacccaggccac

SEQ ID NO: 326 - DNA, 20 bp, Artificial sequence
  Synthetic oligonucleotide
ctcgacccgtggatgagatt

SEQ ID NO: 327 - DNA, 20 bp, Artificial sequence
  Synthetic oligonucleotide
acacttcgccttgcacttca

SEQ ID NO: 328 - DNA, 102 bp, Artificial sequence
  Synthetic oligonucleotide
ctcgacccgtggatgagattaacaccatctatcttggcgggcccttcagtcctaatgtcctgaactggcgggcactgaagtatgaagtgcaaggcgaagtgt

SEQ ID NO: 329 - DNA, 17 bp, Artificial sequence
  Synthetic oligonucleotide
cctcgacccgtggtgct

SEQ ID NO: 330 - DNA, 20 bp, Artificial sequence
  Synthetic oligonucleotide
gtggcctgggtatattggga

SEQ ID NO: 331 - DNA, 124 bp, Artificial sequence
  Synthetic oligonucleotide
cctcgacccgtggtgctttcttaattttatggctcttctgggaaactcctccccttttccacacgaaccttgtggggctgtgaattctttcttcatccccgcattcccaatatacccaggccac

SEQ ID NO: 332 - DNA, 21 bp, Artificial sequence
  Synthetic oligonucleotide
gcaggattccttcgtctcaga

SEQ ID NO: 333 - DNA, 20 bp, Artificial sequence
  Synthetic oligonucleotide
gagaaagtggagggactgcg

SEQ ID NO: 334 - DNA, 145 bp, Artificial sequence
  Synthetic oligonucleotide
gcaggattccttcgtctcagaatcaggacactggccaggtgtctggtttgggtccagagtgctcatcatcatgtcatagaactgctgggcccaggtctcctgaaatgggaagcccagcaataccacgcagtccctccactttctc

SEQ ID NO: 335 - DNA, 22 bp, Artificial sequence
  Synthetic oligonucleotide
gaaggcttttgtgtttcccaaa

SEQ ID NO: 336 - DNA, 22 bp, Artificial sequence
  Synthetic oligonucleotide
agaagtggaggcacacagtgaa

SEQ ID NO: 337 - DNA, 101 bp, Artificial sequence
  Synthetic oligonucleotide
gaaggcttttgtgtttcccaaagagtcggatacttcctatgtatccctcaaagcaccgttaacgaagcctctcaaagccttcactgtgtgcctccacttct

SEQ ID NO: 338 - DNA, 3209 bp, Homo sapiens
caagcccagcagccccggggcggatggctccggccgcctggctccgcagcgcggccgcgcgcgccctcctgcccccgatgctgctgctgctgctccagccgccgccgctgctggcccgggctctgccgccggacgtccaccacctccatgccgagaggagggggccacagccctggcatgcagccctgcccagtagcccggcacctgcccctgccacgcaggaagccccccggcctgccagcagcctcaggcctccccgctgtggcgtgcccgacccatctgatgggctgagtgcccgcaaccgacagaagaggttcgtgctttctggcgggcgctgggagaagacggacctcacctacaggtaggggcctgggagcaggacactaggatgccacctgtgtgtccgtgggtaagccagctgccctcacagctgctgcttgagacacaggccagggtagatcttcgtgtctaacagacctgtgtgtccactgaaccccagggaggtcatctatgggcaaaccccctgaaaccccaacttagacacatacacatatggagaccctccctcagcagaggggcagagcctccgtcatcatgcaaagtgtcgcagcacatgcctgcggacgggtgttcagtcactcaggcagcctttacaagagacctgtgaggaccaggctctgggactccacggtgaatgaggcagacacagccccatcctctgtgtcagtctgaggtgggtgtcagccatgtcattgtccaactctaccatcacaacttgggcttcgagcaggtggagacagtggtaagcggggagaggcaatagtgggcatctcactgggtgacctgggaggaccctgggcaggtgatggggaagctgaggctcacacatcctgcgggtggggacccagcctgaagaatgggctggtgtcacacagcattggagctgagactggggtctttagaatttcctaggtgggggcctgggaaccaacaggggctcaaggaaccaaggtgtccccacagtgagtggcactgtcaggtctaggatgggggtctcgggacccctggtcctggttctttccactgaattcagacacttgtatttgcctaagtatgagcaaaccacatacacatgtgcccatgtggccagggagaccagtgcgctgaagctgaggcccagagtacacctggcctgtgtcctgagtgttcacacacccaccaagcatccaggggcaactcctggtgcctcagccatcgggggctgtcccttccctgaggcccaggcccctccatctccctccaggatccttcggttcccatggcagttggtgcaggagcaggtgcggcagacgatggcagaggccctaaaggtatggagcgatgtgacgccactcacctttactgaggtgcacgagggccgtgctgacatcatgatcgacttcgccaggtactggcatggggacgacctgccgtttgatgggcctgggggcatcctggcccatgccttcttccccaagactcaccgagaaggggatgtccacttcgactatgatgagacctggactatcggggatgaccagggcacagacctgctgcaggtggcagcccatgaatttggccacgtgctggggctgcagcacacaacagcagccaaggccctgatgtccgccttctacacctttcgctacccactgagtctcagcccagatgactgcaggggcgttcaacacctatatggccagccctggcccactgtcacctccaggaccccagccctgggcccccaggctgggatagacaccaatgagattgcaccgctggagccagacgccccgccagatgcctgtgaggcctcctttgacgcggtctccaccatccgaggcgagctctttttcttcaaagcgggctttgtgtggcgcctccgtgggggccagctgcagcccggctacccagcattggcctctcgccactggcagggactgcccagccctgtggacgctgccttcgaggatgcccagggccacatttggttcttccaaggtgctcagtactgggtgtacgacggtgaaaagccagtcctgggccccgcacccctcaccgagctgggcctggtgaggttcccggtccatgctgccttggtctggggtcccgagaagaacaagatctacttcttccgaggcagggactactggcgtttccaccccagcacccggcgtgtagacagtcccgtgccccgcagggccactgactggagaggggtgccctctgagatcgacgctgccttccaggatgctgatggctatgcctacttcctgcgcggccgcctctactggaagtttgaccctgtgaaggtgaaggctctggaaggcttcccccgtctcgtgggtcctgacttctttggctgtgccgagcctgccaacactttcctctgaccatggcttggatgccctcaggggtgctgacccctgccaggccacgaatatcaggctagagacccatggccatctttgtggctgtgggcaccaggcatgggactgagcccatgtctcctcagggggatggggtggggtacaaccaccatgacaactgccgggagggccacgcaggtcgtggtcacctgccagcgactgtctcagactgggcagggaggctttggcatgacttaagaggaagggcagtcttgggcccgctatgcaggtcctggcaaacctggctgccctgtctccatccctgtccctcagggtagcaccatggcaggactgggggaactggagtgtccttgctgtatccctgttgtgaggttccttccaggggctggcactgaagcaagggtgctggggccccatggccttcagccctggctgagcaactgggctgtagggcagggccacttcctgaggtcaggtcttggtaggtgcctgcatctgtctgccttctggctgacaatcctggaaatctgttctccagaatccaggccaaaaagttcacagtcaaatggggaggggtattcttcatgcaggagaccccaggccctggaggctgcaacatacctcaatcctgtcccaggccggatcctcctgaagcccttttcgcagcactgctatcctccaaagccattgtaaatgtgtgtacagtgtgtataaaccttcttcttcttttttttttttaaactgaggattgtcattaaacacagttgttttctacctgcc

SEQ ID NO: 339 - DNA, 3194 bp, Homo sapiens
caagcccagcagccccggggcggatggctccggccgcctggctccgcagcgcggccgcgcgcgccctcctgcccccgatgctgctgctgctgctccagccgccgccgctgctggcccgggctctgccgccggacgtccaccacctccatgccgagaggagggggccacagccctggcatgcagccctgcccagtagcccggcacctgcccctgccacgcaggaagccccccggcctgccagcagcctcaggcctccccgctgtggcgtgcccgacccatctgatgggctgagtgcccgcaaccgacagaagaggttcgtgctttctggcgggcgctgggagaagacggacctcacctacaggatccttcggttcccatggcagttggtgcaggagcaggtgcggcagacgatggcagaggccctaaaggtatggagcgatgtgacgccactcacctttactgaggtgcacgagggccgtgctgacatcatgatcgacttcgccaggtactggcatggggacgacctgccgtttgatgggcctgggggcatcctggcccatgccttcttccccaagactcaccgagaaggggatgtccacttcgactatgatgagacctggactatcggggatgaccagggcacagacctgctgcaggtggcagcccatgaatttggccacgtgctggggctgcagcacacaacagcagccaaggccctgatgtccgccttctacacctttcgctacccactgagtctcagcccagatgactgcaggggcgttcaacacctatatggccagccctggcccactgtcacctccaggaccccagccctgggcccccaggctgggatagacaccaatgagattgcaccgctggagccagacgccccgccagatgcctgtgaggcctcctttgacgcggtctccaccatccgaggcgagctctttttcttcaaagcgggctttgtgtggcgcctccgtgggggccagctgcagcccggctacccagcattggcctctcgccactggcagggactgcccagccctgtggacgctgccttcgaggatgcccagggccacatttggttcttccaaggtgctcagtactgggtgtacgacggtgaaaagccagtcctgggccccgcacccctcaccgagctgggcctggtgaggttcccggtccatgctgccttggtctggggtcccgagaagaacaagatctacttcttccgaggcagggactactggcgtttccaccccagcacccggcgtgtagacagtcccgtgccccgcagggccactgactggagaggggtgccctctgagatcgacgctgccttccaggatgctgatggtgcgttgggggtgaggcagctggtgggaggtgggcacagcagccgcttctcccacctggtggtggctgggctcccacatgcctgccacaggaagtctggctcttcatcacaggtcctttgtccagagccatctgccctcctctcggtggccggctagtgctacattccatattgcagatgaggaaactgagggtcagagaagtgcaaggtcttaccctggtttttcagccacagccagtagaacaataaactgctgtacactgagggccaacaatgctctaagctccttactggtctcatccagttctcagaacagccctctgatgtgacacctgttgtgaacccagtttccagaggagcaaacagaggctcaggcaatgaggcccctaacctggactaccctggtggtccctgctcctaaccactgacccacccagcctcccacaaccacagggggctagagccagtccagtgctccctcccctgctaggctcctcttctgtgctctttctcccacatcaggacccactgggagagctatcctagggtagcctccagctccaggactccagggtgcccgtcaatagcctggctaatttaatagatgcaggagagagtgatgtggagggtggtgggggcaacgggacttgctttcctgagaggtgggactcaggcctctgaggctctgggtacctgtcaggctgggtattagcccagcccagattccggggcaggcagaagggctccctagagggaagagaggttctgaaaggccggccctggatcctgcaggactcgaggaactcagcagtggccaagggcttcccactcagccctcccttagtgcccatccctgggcacagcctgacaggcaggagtagggcccagtgtccactcgcccaggcttgaccaccttctcttctcaggctatgcctacttcctgcgcggccgcctctactggaagtttgaccctgtgaaggtgaaggctctggaaggcttcccccgtctcgtgggtcctgacttctttggctgtgccgagcctgccaacactttcctctgaccatggcttggatgccctcaggggtgctgacccctgccaggccacgaatatcaggctagagacccatggccatctttgtggctgtgggcaccaggcatgggactgagcccatgtctcctcagggggatggggtggggtacaaccaccatgacaactgccgggagggccacgcaggtcgtggtcacctgccagcgactgtctcagactgggcagggaggctttggcatgacttaagaggaagggcagtcttgggcccgctatgcaggtcctggcaaacctggctgccctgtctccatccctgtccctcagggtagcaccatggcaggactgggggaactggagtgtccttgctgtatccctgttgtgaggttccttccaggggctggcactgaagcaagggtgctggggccccatggccttcagccctggctgagcaactgggctgtagggcagggccacttcctgaggtcaggtcttggtaggtgcctgcatctgtctgccttctggctgacaatcctggaaatctgttctccagaatccaggccaaaaagttcacagtcaaatggggaggggtattcttcatgcaggagaccccaggccctggaggctgcaacatacctcaatcctgtcccaggccggatcctcctgaagcccttttcgcagcactgctatcctccaaagccattgtaaatgtgtgtacagtgtgtataaaccttcttcttcttttttttttttaaactgaggattgtcattaaacacagttgttttctacctgcc

SEQ ID NO: 340 - DNA, 3632 bp, Homo sapiens
caagcccagcagccccggggcggatggctccggccgcctggctccgcagcgcggccgcgcgcgccctcctgcccccgatgctgctgctgctgctccagccgccgccgctgctggcccgggctctgccgccggacgtccaccacctccatgccgagaggagggggccacagccctggcatgcagccctgcccagtagcccggcacctgcccctgccacgcaggaagccccccggcctgccagcagcctcaggcctccccgctgtggcgtgcccgacccatctgatgggctgagtgcccgcaaccgacagaagaggttcgtgctttctggcgggcgctgggagaagacggacctcacctacaggatccttcggttcccatggcagttggtgcaggagcaggtgcggcagacgatggcagaggccctaaaggtatggagcgatgtgacgccactcacctttactgaggtgcacgagggccgtgctgacatcatgatcgacttcgccaggtactggcatggggacgacctgccgtttgatgggcctgggggcatcctggcccatgccttcttccccaagactcaccgagaaggggatgtccacttcgactatgatgagacctggactatcggggatgaccagggcacagacctgctgcaggtggcagcccatgaatttggccacgtgctggggctgcagcacacaacagcagccaaggccctgatgtccgccttctacacctttcgctacccactgagtctcagcccagatgactgcaggggcgttcaacacctatatggccagccctggcccactgtcacctccaggaccccagccctgggcccccaggctgggatagacaccaatgagattgcaccgctggagccagacgccccgccagatgcctgtgaggcctcctttgacgcggtctccaccatccgaggcgagctctttttcttcaaagcgggctttgtgtggcgcctccgtgggggccagctgcagcccggctacccagcattggcctctcgccactggcagggactgcccagccctgtggacgctgccttcgaggatgcccagggccacatttggttcttccaagagctgggatttccatcctcaactggcagagatgagagcctggagcattgcagatgccagggacttcacaaatgaaggcacagcatgggaaacctgcgtgggttccagggcagtccagcctgcaggggcccagggagtggtcagtaggcatttgtcacagccaaatgccagtggaaggagcagccgcccaggcagccctctactgatgagagtaacctcacccgtgcactagtttacagagcattcactgccccagcttatcccaggcctcccgcttccctctgcgggtggggtgctgagcaggcattattggcctgcatgttttactgatgaggaaactgaggctgggagagtctgtggtaggggtcaagcaggtccacagtggcggggcatggcagtggtggctgggcaggtccttgcagccttccctctccggcaggtgctcagtactgggtgtacgacggtgaaaagccagtcctgggccccgcacccctcaccgagctgggcctggtgaggttcccggtccatgctgccttggtctggggtcccgagaagaacaagatctacttcttccgaggcagggactactggcgtttccaccccagcacccggcgtgtagacagtcccgtgccccgcagggccactgactggagaggggtgccctctgagatcgacgctgccttccaggatgctgatggtgcgttgggggtgaggcagctggtgggaggtgggcacagcagccgcttctcccacctggtggtggctgggctcccacatgcctgccacaggaagtctggctcttcatcacaggtcctttgtccagagccatctgccctcctctcggtggccggctagtgctacattccatattgcagatgaggaaactgagggtcagagaagtgcaaggtcttaccctggtttttcagccacagccagtagaacaataaactgctgtacactgagggccaacaatgctctaagctccttactggtctcatccagttctcagaacagccctctgatgtgacacctgttgtgaacccagtttccagaggagcaaacagaggctcaggcaatgaggcccctaacctggactaccctggtggtccctgctcctaaccactgacccacccagcctcccacaaccacagggggctagagccagtccagtgctccctcccctgctaggctcctcttctgtgctctttctcccacatcaggacccactgggagagctatcctagggtagcctccagctccaggactccagggtgcccgtcaatagcctggctaatttaatagatgcaggagagagtgatgtggagggtggtgggggcaacgggacttgctttcctgagaggtgggactcaggcctctgaggctctgggtacctgtcaggctgggtattagcccagcccagattccggggcaggcagaagggctccctagagggaagagaggttctgaaaggccggccctggatcctgcaggactcgaggaactcagcagtggccaagggcttcccactcagccctcccttagtgcccatccctgggcacagcctgacaggcaggagtagggcccagtgtccactcgcccaggcttgaccaccttctcttctcaggctatgcctacttcctgcgcggccgcctctactggaagtttgaccctgtgaaggtgaaggctctggaaggcttcccccgtctcgtgggtcctgacttctttggctgtgccgagcctgccaacactttcctctgaccatggcttggatgccctcaggggtgctgacccctgccaggccacgaatatcaggctagagacccatggccatctttgtggctgtgggcaccaggcatgggactgagcccatgtctcctcagggggatggggtggggtacaaccaccatgacaactgccgggagggccacgcaggtcgtggtcacctgccagcgactgtctcagactgggcagggaggctttggcatgacttaagaggaagggcagtcttgggcccgctatgcaggtcctggcaaacctggctgccctgtctccatccctgtccctcagggtagcaccatggcaggactgggggaactggagtgtccttgctgtatccctgttgtgaggttccttccaggggctggcactgaagcaagggtgctggggccccatggccttcagccctggctgagcaactgggctgtagggcagggccacttcctgaggtcaggtcttggtaggtgcctgcatctgtctgccttctggctgacaatcctggaaatctgttctccagaatccaggccaaaaagttcacagtcaaatggggaggggtattcttcatgcaggagaccccaggccctggaggctgcaacatacctcaatcctgtcccaggccggatcctcctgaagcccttttcgcagcactgctatcctccaaagccattgtaaatgtgtgtacagtgtgtataaaccttcttcttcttttttttttttaaactgaggattgtcattaaacacagttgttttctacctgcc

SEQ ID NO: 341 - DNA, 2705 bp, Homo sapiens
caagcccagcagccccggggcggatggctccggccgcctggctccgcagcgcggccgcgcgcgccctcctgcccccgatgctgctgctgctgctccagccgccgccgctgctggcccgggctctgccgccggacgtccaccacctccatgccgagaggagggggccacagccctggcatgcagccctgcccagtagcccggcacctgcccctgccacgcaggaagccccccggcctgccagcagcctcaggcctccccgctgtggcgtgcccgacccatctgatgggctgagtgcccgcaaccgacagaagaggttcgtgctttctggcgggcgctgggagaagacggacctcacctacaggatccttcggttcccatggcagttggtgcaggagcaggtgcggcagacgatggcagaggccctaaaggtatggagcgatgtgacgccactcacctttactgaggtgcacgagggccgtgctgacatcatgatcgacttcgccaggtactggcatggggacgacctgccgtttgatgggcctgggggcatcctggcccatgccttcttccccaagactcaccgagaaggggatgtccacttcgactatgatgagacctggactatcggggatgaccagggcacagacctgctgcaggtggcagcccatgaatttggccacgtgctggggctgcagcacacaacagcagccaaggccctgatgtccgccttctacacctttcgctacccactgagtctcagcccagatgactgcaggggcgttcaacacctatatggccagccctggcccactgtcacctccaggaccccagccctgggcccccaggctgggatagacaccaatgagattgcaccgctggagccagacgccccgccagatgcctgtgaggcctcctttgacgcggtctccaccatccgaggcgagctctttttcttcaaagcgggctttgtgtggcgcctccgtgggggccagctgcagcccggctacccagcattggcctctcgccactggcagggactgcccagccctgtggacgctgccttcgaggatgcccagggccacatttggttcttccaagagctgggatttccatcctcaactggcagagatgagagcctggagcattgcagatgccagggacttcacaaatgaaggcacagcatgggaaacctgcgtgggttccagggcagtccagcctgcaggggcccagggagtggtcagtaggcatttgtcacagccaaatgccagtggaaggagcagccgcccaggcagccctctactgatgagagtaacctcacccgtgcactagtttacagagcattcactgccccagcttatcccaggcctcccgcttccctctgcgggtggggtgctgagcaggcattattggcctgcatgttttactgatgaggaaactgaggctgggagagtctgtggtaggggtcaagcaggtccacagtggcggggcatggcagtggtggctgggcaggtccttgcagccttccctctccggcaggtgctcagtactgggtgtacgacggtgaaaagccagtcctgggccccgcacccctcaccgagctgggcctggtgaggttcccggtccatgctgccttggtctggggtcccgagaagaacaagatctacttcttccgaggcagggactactggcgtttccaccccagcacccggcgtgtagacagtcccgtgccccgcagggccactgactggagaggggtgccctctgagatcgacgctgccttccaggatgctgatggctatgcctacttcctgcgcggccgcctctactggaagtttgaccctgtgaaggtgaaggctctggaaggcttcccccgtctcgtgggtcctgacttctttggctgtgccgagcctgccaacactttcctctgaccatggcttggatgccctcaggggtgctgacccctgccaggccacgaatatcaggctagagacccatggccatctttgtggctgtgggcaccaggcatgggactgagcccatgtctcctcagggggatggggtggggtacaaccaccatgacaactgccgggagggccacgcaggtcgtggtcacctgccagcgactgtctcagactgggcagggaggctttggcatgacttaagaggaagggcagtcttgggcccgctatgcaggtcctggcaaacctggctgccctgtctccatccctgtccctcagggtagcaccatggcaggactgggggaactggagtgtccttgctgtatccctgttgtgaggttccttccaggggctggcactgaagcaagggtgctggggccccatggccttcagccctggctgagcaactgggctgtagggcagggccacttcctgaggtcaggtcttggtaggtgcctgcatctgtctgccttctggctgacaatcctggaaatctgttctccagaatccaggccaaaaagttcacagtcaaatggggaggggtattcttcatgcaggagaccccaggccctggaggctgcaacatacctcaatcctgtcccaggccggatcctcctgaagcccttttcgcagcactgctatcctccaaagccattgtaaatgtgtgtacagtgtgtataaaccttcttcttcttttttttttttaaactgaggattgtcattaaacacagttgttttctacctgcc

SEQ ID NO: 342 - DNA, 3332 bp, Homo sapiens
caagcccagcagccccggggcggatggctccggccgcctggctccgcagcgcggccgcgcgcgccctcctgcccccgatgctgctgctgctgctccagccgccgccgctgctggcccgggctctgccgccggacgtccaccacctccatgccgagaggagggggccacagccctggcatgcagccctgcccagtagcccggcacctgcccctgccacgcaggaagccccccggcctgccagcagcctcaggcctccccgctgtggcgtgcccgacccatctgatgggctgagtgcccgcaaccgacagaagaggttcgtgctttctggcgggcgctgggagaagacggacctcacctacaggatccttcggttcccatggcagttggtgcaggagcaggtgcggcagacgatggcagaggccctaaaggtatggagcgatgtgacgccactcacctttactgaggtgcacgagggccgtgctgacatcatgatcgacttcgccaggtactggcatggggacgacctgccgtttgatgggcctgggggcatcctggcccatgccttcttccccaagactcaccgagaaggggatgtccacttcgactatgatgagacctggactatcggggatgaccagggcacagacctgctgcaggtggcagcccatgaatttggccacgtgctggggctgcagcacacaacagcagccaaggccctgatgtccgccttctacacctttcgctacccactgagtctcagcccagatgactgcaggggcgttcaacacctatatggccagccctggcccactgtcacctccaggaccccagccctgggcccccaggctgggatagacaccaatgagattgcaccgctggagccagacgccccgccagatgcctgtgaggcctcctttgacgcggtctccaccatccgaggcgagctctttttcttcaaagcgggctttgtgtggcgcctccgtgggggccagctgcagcccggctacccagcattggcctctcgccactggcagggactgcccagccctgtggacgctgccttcgaggatgcccagggccacatttggttcttccaagagctgggatttccatcctcaactggcagagatgagagcctggagcattgcagatgccagggacttcacaaatgaaggcacagcatgggaaacctgcgtgggttccagggcagtccagcctgcaggggcccagggagtggtgctcagtactgggtgtacgacggtgaaaagccagtcctgggccccgcacccctcaccgagctgggcctggtgaggttcccggtccatgctgccttggtctggggtcccgagaagaacaagatctacttcttccgaggcagggactactggcgtttccaccccagcacccggcgtgtagacagtcccgtgccccgcagggccactgactggagaggggtgccctctgagatcgacgctgccttccaggatgctgatggtgcgttgggggtgaggcagctggtgggaggtgggcacagcagccgcttctcccacctggtggtggctgggctcccacatgcctgccacaggaagtctggctcttcatcacaggtcctttgtccagagccatctgccctcctctcggtggccggctagtgctacattccatattgcagatgaggaaactgagggtcagagaagtgcaaggtcttaccctggtttttcagccacagccagtagaacaataaactgctgtacactgagggccaacaatgctctaagctccttactggtctcatccagttctcagaacagccctctgatgtgacacctgttgtgaacccagtttccagaggagcaaacagaggctcaggcaatgaggcccctaacctggactaccctggtggtccctgctcctaaccactgacccacccagcctcccacaaccacagggggctagagccagtccagtgctccctcccctgctaggctcctcttctgtgctctttctcccacatcaggacccactgggagagctatcctagggtagcctccagctccaggactccagggtgcccgtcaatagcctggctaatttaatagatgcaggagagagtgatgtggagggtggtgggggcaacgggacttgctttcctgagaggtgggactcaggcctctgaggctctgggtacctgtcaggctgggtattagcccagcccagattccggggcaggcagaagggctccctagagggaagagaggttctgaaaggccggccctggatcctgcaggactcgaggaactcagcagtggccaagggcttcccactcagccctcccttagtgcccatccctgggcacagcctgacaggcaggagtagggcccagtgtccactcgcccaggcttgaccaccttctcttctcaggctatgcctacttcctgcgcggccgcctctactggaagtttgaccctgtgaaggtgaaggctctggaaggcttcccccgtctcgtgggtcctgacttctttggctgtgccgagcctgccaacactttcctctgaccatggcttggatgccctcaggggtgctgacccctgccaggccacgaatatcaggctagagacccatggccatctttgtggctgtgggcaccaggcatgggactgagcccatgtctcctcagggggatggggtggggtacaaccaccatgacaactgccgggagggccacgcaggtcgtggtcacctgccagcgactgtctcagactgggcagggaggctttggcatgacttaagaggaagggcagtcttgggcccgctatgcaggtcctggcaaacctggctgccctgtctccatccctgtccctcagggtagcaccatggcaggactgggggaactggagtgtccttgctgtatccctgttgtgaggttccttccaggggctggcactgaagcaagggtgctggggccccatggccttcagccctggctgagcaactgggctgtagggcagggccacttcctgaggtcaggtcttggtaggtgcctgcatctgtctgccttctggctgacaatcctggaaatctgttctccagaatccaggccaaaaagttcacagtcaaatggggaggggtattcttcatgcaggagaccccaggccctggaggctgcaacatacctcaatcctgtcccaggccggatcctcctgaagcccttttcgcagcactgctatcctccaaagccattgtaaatgtgtgtacagtgtgtataaaccttcttcttcttttttttttttaaactgaggattgtcattaaacacagttgttttctacctgcc

SEQ ID NO: 343 - DNA, 3052 bp, Homo sapiens
caagcccagcagccccggggcggatggctccggccgcctggctccgcagcgcggccgcgcgcgccctcctgcccccgatgctgctgctgctgctccagccgccgccgctgctggcccgggctctgccgccggacgtccaccacctccatgccgagaggagggggccacagccctggcatgcagccctgcccagtagcccggcacctgcccctgccacgcaggaagccccccggcctgccagcagcctcaggcctccccgctgtggcgtgcccgacccatctgatgggctgagtgcccgcaaccgacagaagaggttcgtgctttctggcgggcgctgggagaagacggacctcacctacaggatccttcggttcccatggcagttggtgcaggagcaggtgcggcagacgatggcagaggccctaaaggtatggagcgatgtgacgccactcacctttactgaggtgcacgagggccgtgctgacatcatgatcgacttcgccaggtactggcatggggacgacctgccgtttgatgggcctgggggcatcctggcccatgccttcttccccaagactcaccgagaaggggatgtccacttcgactatgatgagacctggactatcggggatgaccagggcacagacctgctgcaggtggcagcccatgaatttggccacgtgctggggctgcagcacacaacagcagccaaggccctgatgtccgccttctacacctttcgctacccactgagtctcagcccagatgactgcaggggcgttcaacacctatatggccagccctggcccactgtcacctccaggaccccagccctgggcccccaggctgggatagacaccaatgagattgcaccgctggagccagacgccccgccagatgcctgtgaggcctcctttgacgcggtctccaccatccgaggcgagctctttttcttcaaagcgggctttgtgtggcgcctccgtgggggccagctgcagcccggctacccagcattggcctctcgccactggcagggactgcccagccctgtggacgctgccttcgaggatgcccagggccacatttggttcttccaagggactactggcgtttccaccccagcacccggcgtgtagacagtcccgtgccccgcagggccactgactggagaggggtgccctctgagatcgacgctgccttccaggatgctgatggtgcgttgggggtgaggcagctggtgggaggtgggcacagcagccgcttctcccacctggtggtggctgggctcccacatgcctgccacaggaagtctggctcttcatcacaggtcctttgtccagagccatctgccctcctctcggtggccggctagtgctacattccatattgcagatgaggaaactgagggtcagagaagtgcaaggtcttaccctggtttttcagccacagccagtagaacaataaactgctgtacactgagggccaacaatgctctaagctccttactggtctcatccagttctcagaacagccctctgatgtgacacctgttgtgaacccagtttccagaggagcaaacagaggctcaggcaatgaggcccctaacctggactaccctggtggtccctgctcctaaccactgacccacccagcctcccacaaccacagggggctagagccagtccagtgctccctcccctgctaggctcctcttctgtgctctttctcccacatcaggacccactgggagagctatcctagggtagcctccagctccaggactccagggtgcccgtcaatagcctggctaatttaatagatgcaggagagagtgatgtggagggtggtgggggcaacgggacttgctttcctgagaggtgggactcaggcctctgaggctctgggtacctgtcaggctgggtattagcccagcccagattccggggcaggcagaagggctccctagagggaagagaggttctgaaaggccggccctggatcctgcaggactcgaggaactcagcagtggccaagggcttcccactcagccctcccttagtgcccatccctgggcacagcctgacaggcaggagtagggcccagtgtccactcgcccaggcttgaccaccttctcttctcaggctatgcctacttcctgcgcggccgcctctactggaagtttgaccctgtgaaggtgaaggctctggaaggcttcccccgtctcgtgggtcctgacttctttggctgtgccgagcctgccaacactttcctctgaccatggcttggatgccctcaggggtgctgacccctgccaggccacgaatatcaggctagagacccatggccatctttgtggctgtgggcaccaggcatgggactgagcccatgtctcctcagggggatggggtggggtacaaccaccatgacaactgccgggagggccacgcaggtcgtggtcacctgccagcgactgtctcagactgggcagggaggctttggcatgacttaagaggaagggcagtcttgggcccgctatgcaggtcctggcaaacctggctgccctgtctccatccctgtccctcagggtagcaccatggcaggactgggggaactggagtgtccttgctgtatccctgttgtgaggttccttccaggggctggcactgaagcaagggtgctggggccccatggccttcagccctggctgagcaactgggctgtagggcagggccacttcctgaggtcaggtcttggtaggtgcctgcatctgtctgccttctggctgacaatcctggaaatctgttctccagaatccaggccaaaaagttcacagtcaaatggggaggggtattcttcatgcaggagaccccaggccctggaggctgcaacatacctcaatcctgtcccaggccggatcctcctgaagcccttttcgcagcactgctatcctccaaagccattgtaaatgtgtgtacagtgtgtataaaccttcttcttcttttttttttttaaactgaggattgtcattaaacacagttgttttctacctgcc

SEQ ID NO: 344 - DNA, 2359 bp, Homo sapiens
caagcccagcagccccggggcggatggctccggccgcctggctccgcagcgcggccgcgcgcgccctcctgcccccgatgctgctgctgctgctccagccgccgccgctgctggcccgggctctgccgccggacgtccaccacctccatgccgagaggagggggccacagccctggcatgcagccctgcccagtagcccggcacctgcccctgccacgcaggaagccccccggcctgccagcagcctcaggcctccccgctgtggcgtgcccgacccatctgatgggctgagtgcccgcaaccgacagaagaggttcgtgctttctggcgggcgctgggagaagacggacctcacctacaggatccttcggttcccatggcagttggtgcaggagcaggtgcggcagacgatggcagaggccctaaaggtatggagcgatgtgacgccactcacctttactgaggtgcacgagggccgtgctgacatcatgatcgacttcgccaggtactggcatggggacgacctgccgtttgatgggcctgggggcatcctggcccatgccttcttccccaagactcaccgagaaggggatgtccacttcgactatgatgagacctggactatcggggatgaccagggcacagacctgctgcaggtggcagcccatgaatttggccacgtgctggggctgcagcacacaacagcagccaaggccctgatgtccgccttctacacctttcgctacccactgagtctcagcccagatgactgcaggggcgttcaacacctatatggccagccctggcccactgtcacctccaggaccccagccctgggcccccaggctgggatagacaccaatgagattgcaccgctggaggtgaggccctgcctgccagtccccctactcctctgctggccactgtgactgcagcatatgccctcagcatgtgtccctctctcccaccccagccagacgccccgccagatgcctgtgaggcctcctttgacgcggtctccaccatccgaggcgagctctttttcttcaaagcgggctttgtgtggcgcctccgtgggggccagctgcagcccggctacccagcattggcctctcgccactggcagggactgcccagccctgtggacgctgccttcgaggatgcccagggccacatttggttcttccaaggtgctcagtactgggtgtacgacggtgaaaagccagtcctgggccccgcacccctcaccgagctgggcctggtgaggttcccggtccatgctgccttggtctggggtcccgagaagaacaagatctacttcttccgaggcagggactactggcgtttccaccccagcacccggcgtgtagacagtcccgtgccccgcagggccactgactggagaggggtgccctctgagatcgacgctgccttccaggatgctgatggctatgcctacttcctgcgcggccgcctctactggaagtttgaccctgtgaaggtgaaggctctggaaggcttcccccgtctcgtgggtcctgacttctttggctgtgccgagcctgccaacactttcctctgaccatggcttggatgccctcaggggtgctgacccctgccaggccacgaatatcaggctagagacccatggccatctttgtggctgtgggcaccaggcatgggactgagcccatgtctcctcagggggatggggtggggtacaaccaccatgacaactgccgggagggccacgcaggtcgtggtcacctgccagcgactgtctcagactgggcagggaggctttggcatgacttaagaggaagggcagtcttgggcccgctatgcaggtcctggcaaacctggctgccctgtctccatccctgtccctcagggtagcaccatggcaggactgggggaactggagtgtccttgctgtatccctgttgtgaggttccttccaggggctggcactgaagcaagggtgctggggccccatggccttcagccctggctgagcaactgggctgtagggcagggccacttcctgaggtcaggtcttggtaggtgcctgcatctgtctgccttctggctgacaatcctggaaatctgttctccagaatccaggccaaaaagttcacagtcaaatggggaggggtattcttcatgcaggagaccccaggccctggaggctgcaacatacctcaatcctgtcccaggccggatcctcctgaagcccttttcgcagcactgctatcctccaaagccattgtaaatgtgtgtacagtgtgtataaaccttcttcttcttttttttttttaaactgaggattgtcattaaacacagttgttttctacctgcc

SEQ ID NO: 345 - DNA, 2077 bp, Homo sapiens
caagcccagcagccccggggcggatggctccggccgcctggctccgcagcgcggccgcgcgcgccctcctgcccccgatgctgctgctgctgctccagccgccgccgctgctggcccgggctctgccgccggacgtccaccacctccatgccgagaggagggggccacagccctggcatgcagccctgcccagtagcccggcacctgcccctgccacgcaggaagccccccggcctgccagcagcctcaggcctccccgctgtggcgtgcccgacccatctgatgggctgagtgcccgcaaccgacagaagaggatccttcggttcccatggcagttggtgcaggagcaggtgcggcagacgatggcagaggccctaaaggtatggagcgatgtgacgccactcacctttactgaggtgcacgagggccgtgctgacatcatgatcgacttcgccaggtactggcatggggacgacctgccgtttgatgggcctgggggcatcctggcccatgccttcttccccaagactcaccgagaaggggatgtccacttcgactatgatgagacctggactatcggggatgaccagggcacagacctgctgcaggtggcagcccatgaatttggccacgtgctggggctgcagcacacaacagcagccaaggccctgatgtccgccttctacacctttcgctacccactgagtctcagcccagatgactgcaggggcgttcaacacctatatggccagccctggcccactgtcacctccaggaccccagccctgggcccccaggctgggatagacaccaatgagattgcaccgctggagccagacgccccgccagatgcctgtgaggcctcctttgacgcggtctccaccatccgaggcgagctctttttcttcaaagcgggctttgtgtggcgcctccgtgggggccagctgcagcccggctacccagcattggcctctcgccactggcagggactgcccagccctgtggacgctgccttcgaggatgcccagggccacatttggttcttccaagggactactggcgtttccaccccagcacccggcgtgtagacagtcccgtgccccgcagggccactgactggagaggggtgccctctgagatcgacgctgccttccaggatgctgatggctatgcctacttcctgcgcggccgcctctactggaagtttgaccctgtgaaggtgaaggctctggaaggcttcccccgtctcgtgggtcctgacttctttggctgtgccgagcctgccaacactttcctctgaccatggcttggatgccctcaggggtgctgacccctgccaggccacgaatatcaggctagagacccatggccatctttgtggctgtgggcaccaggcatgggactgagcccatgtctcctcagggggatggggtggggtacaaccaccatgacaactgccgggagggccacgcaggtcgtggtcacctgccagcgactgtctcagactgggcagggaggctttggcatgacttaagaggaagggcagtcttgggcccgctatgcaggtcctggcaaacctggctgccctgtctccatccctgtccctcagggtagcaccatggcaggactgggggaactggagtgtccttgctgtatccctgttgtgaggttccttccaggggctggcactgaagcaagggtgctggggccccatggccttcagccctggctgagcaactgggctgtagggcagggccacttcctgaggtcaggtcttggtaggtgcctgcatctgtctgccttctggctgacaatcctggaaatctgttctccagaatccaggccaaaaagttcacagtcaaatggggaggggtattcttcatgcaggagaccccaggccctggaggctgcaacatacctcaatcctgtcccaggccggatcctcctgaagcccttttcgcagcactgctatcctccaaagccattgtaaatgtgtgtacagtgtgtataaaccttcttcttcttttttttttttaaactgaggattgtcattaaacacagttgttttctacctgcc

SEQ ID NO: 346 - DNA, 131 bp, Artificial sequence
  Synthetic oligonucleotide
caagcccagcagccccggggcggatggctccggccgcctggctccgcagcgcggccgcgcgcgccctcctgcccccgatgctgctgctgctgctccagccgccgccgctgctggcccgggctctgccgccg

SEQ ID NO: 347 - DNA, 182 bp, Artificial sequence
  Synthetic oligonucleotide
gacgtccaccacctccatgccgagaggagggggccacagccctggcatgcagccctgcccagtagcccggcacctgcccctgccacgcaggaagccccccggcctgccagcagcctcaggcctccccgctgtggcgtgcccgacccatctgatgggctgagtgcccgcaaccgacagaagag

SEQ ID NO: 348 - DNA, 942 bp, Artificial sequence
  Synthetic oligonucleotide
gtaggggcctgggagcaggacactaggatgccacctgtgtgtccgtgggtaagccagctgccctcacagctgctgcttgagacacaggccagggtagatcttcgtgtctaacagacctgtgtgtccactgaaccccagggaggtcatctatgggcaaaccccctgaaaccccaacttagacacatacacatatggagaccctccctcagcagaggggcagagcctccgtcatcatgcaaagtgtcgcagcacatgcctgcggacgggtgttcagtcactcaggcagcctttacaagagacctgtgaggaccaggctctgggactccacggtgaatgaggcagacacagccccatcctctgtgtcagtctgaggtgggtgtcagccatgtcattgtccaactctaccatcacaacttgggcttcgagcaggtggagacagtggtaagcggggagaggcaatagtgggcatctcactgggtgacctgggaggaccctgggcaggtgatggggaagctgaggctcacacatcctgcgggtggggacccagcctgaagaatgggctggtgtcacacagcattggagctgagactggggtctttagaatttcctaggtgggggcctgggaaccaacaggggctcaaggaaccaaggtgtccccacagtgagtggcactgtcaggtctaggatgggggtctcgggacccctggtcctggttctttccactgaattcagacacttgtatttgcctaagtatgagcaaaccacatacacatgtgcccatgtggccagggagaccagtgcgctgaagctgaggcccagagtacacctggcctgtgtcctgagtgttcacacacccaccaagcatccaggggcaactcctggtgcctcagccatcgggggctgtcccttccctgaggcccaggcccctccatctccctccag

SEQ ID NO: 349 - DNA, 144 bp, Artificial sequence
  Synthetic oligonucleotide
gatccttcggttcccatggcagttggtgcaggagcaggtgcggcagacgatggcagaggccctaaaggtatggagcgatgtgacgccactcacctttactgaggtgcacgagggccgtgctgacatcatgatcgacttcgccag

SEQ ID NO: 350 - DNA, 134 bp, Artificial sequence
  Synthetic oligonucleotide
gtactggcatggggacgacctgccgtttgatgggcctgggggcatcctggcccatgccttcttccccaagactcaccgagaaggggatgtccacttcgactatgatgagacctggactatcggggatgaccagg

SEQ ID NO: 351 - DNA, 183 bp, Artificial sequence
  Synthetic oligonucleotide
acaacagcagccaaggccctgatgtccgccttctacacctttcgctacccactgagtctcagcccagatgactgcaggggcgttcaacacctatatggccagccctggcccactgtcacctccaggaccccagccctgggcccccaggctgggatagacaccaatgagattgcaccgctggag

SEQ ID NO: 352 - DNA, 217 bp, Artificial sequence
  Synthetic oligonucleotide
ccagacgccccgccagatgcctgtgaggcctcctttgacgcggtctccaccatccgaggcgagctctttttcttcaaagcgggctttgtgtggcgcctccgtgggggccagctgcagcccggctacccagcattggcctctcgccactggcagggactgcccagccctgtggacgctgccttcgaggatgcccagggccacatttggttcttccaag

SEQ ID NO: 353 - DNA, 138 bp, Artificial sequence
  Synthetic oligonucleotide
agctgggatttccatcctcaactggcagagatgagagcctggagcattgcagatgccagggacttcacaaatgaaggcacagcatgggaaacctgcgtgggttccagggcagtccagcctgcaggggcccagggagtg

SEQ ID NO: 354 - DNA, 300 bp, Artificial sequence
  Synthetic oligonucleotide
gtcagtaggcatttgtcacagccaaatgccagtggaaggagcagccgcccaggcagccctctactgatgagagtaacctcacccgtgcactagtttacagagcattcactgccccagcttatcccaggcctcccgcttccctctgcgggtggggtgctgagcaggcattattggcctgcatgttttactgatgaggaaactgaggctgggagagtctgtggtaggggtcaagcaggtccacagtggcggggcatggcagtggtggctgggcaggtccttgcagccttccctctccggcag

SEQ ID NO: 355 - DNA, 142 bp, Artificial sequence
  Synthetic oligonucleotide
gtgctcagtactgggtgtacgacggtgaaaagccagtcctgggccccgcacccctcaccgagctgggcctggtgaggttcccggtccatgctgccttggtctggggtcccgagaagaacaagatctacttcttccgaggcag

SEQ ID NO: 356 - DNA, 927 bp, Artificial sequence
  Synthetic oligonucleotide
gtgcgttgggggtgaggcagctggtgggaggtgggcacagcagccgcttctcccacctggtggtggctgggctcccacatgcctgccacaggaagtctggctcttcatcacaggtcctttgtccagagccatctgccctcctctcggtggccggctagtgctacattccatattgcagatgaggaaactgagggtcagagaagtgcaaggtcttaccctggtttttcagccacagccagtagaacaataaactgctgtacactgagggccaacaatgctctaagctccttactggtctcatccagttctcagaacagccctctgatgtgacacctgttgtgaacccagtttccagaggagcaaacagaggctcaggcaatgaggcccctaacctggactaccctggtggtccctgctcctaaccactgacccacccagcctcccacaaccacagggggctagagccagtccagtgctccctcccctgctaggctcctcttctgtgctctttctcccacatcaggacccactgggagagctatcctagggtagcctccagctccaggactccagggtgcccgtcaatagcctggctaatttaatagatgcaggagagagtgatgtggagggtggtgggggcaacgggacttgctttcctgagaggtgggactcaggcctctgaggctctgggtacctgtcaggctgggtattagcccagcccagattccggggcaggcagaagggctccctagagggaagagaggttctgaaaggccggccctggatcctgcaggactcgaggaactcagcagtggccaagggcttcccactcagccctcccttagtgcccatccctgggcacagcctgacaggcaggagtagggcccagtgtccactcgcccaggcttgaccaccttctcttctcag

SEQ ID NO: 357 - DNA, 911 bp, Artificial sequence
  Synthetic oligonucleotide
gctatgcctacttcctgcgcggccgcctctactggaagtttgaccctgtgaaggtgaaggctctggaaggcttcccccgtctcgtgggtcctgacttctttggctgtgccgagcctgccaacactttcctctgaccatggcttggatgccctcaggggtgctgacccctgccaggccacgaatatcaggctagagacccatggccatctttgtggctgtgggcaccaggcatgggactgagcccatgtctcctcagggggatggggtggggtacaaccaccatgacaactgccgggagggccacgcaggtcgtggtcacctgccagcgactgtctcagactgggcagggaggctttggcatgacttaagaggaagggcagtcttgggcccgctatgcaggtcctggcaaacctggctgccctgtctccatccctgtccctcagggtagcaccatggcaggactgggggaactggagtgtccttgctgtatccctgttgtgaggttccttccaggggctggcactgaagcaagggtgctggggccccatggccttcagccctggctgagcaactgggctgtagggcagggccacttcctgaggtcaggtcttggtaggtgcctgcatctgtctgccttctggctgacaatcctggaaatctgttctccagaatccaggccaaaaagttcacagtcaaatggggaggggtattcttcatgcaggagaccccaggccctggaggctgcaacatacctcaatcctgtcccaggccggatcctcctgaagcccttttcgcagcactgctatcctccaaagccattgtaaatgtgtgtacagtgtgtataaaccttcttcttcttttttttttttaaactgaggattgtcattaaacacagttgttttctacctgcc

SEQ ID NO: 358 - DNA, 48 bp, Artificial sequence
  Synthetic oligonucleotide
gttcgtgctttctggcgggcgctgggagaagacggacctcacctacag

SEQ ID NO: 359 - DNA, 41 bp, Artificial sequence
  Synthetic oligonucleotide
gcacagacctgctgcaggtggcagcccatgaatttggccac

SEQ ID NO: 360 - DNA, 18 bp, Artificial sequence
  Synthetic oligonucleotide
gtgctggggctgcagcac

SEQ ID NO: 361 - DNA, 92 bp, Artificial sequence
  Synthetic oligonucleotide
gtgaggccctgcctgccagtccccctactcctctgctggccactgtgactgcagcatatgccctcagcatgtgtccctctctcccaccccag

SEQ ID NO: 362 - DNA, 116 bp, Artificial sequence
  Synthetic oligonucleotide
ggactactggcgtttccaccccagcacccggcgtgtagacagtcccgtgccccgcagggccactgactggagaggggtgccctctgagatcgacgctgccttccaggatgctgatg

SEQ ID NO: 363 - protein, 488 aa, Homo sapiens [sequence omitted]

SEQ ID NO: 364 - protein, 496 aa, Homo sapiens
MAPAAWLRSAAARALLPPMLLLLLQPPPLLARALPPDVHHLHAERRGPQPWHAALPSSPAPAPATQEAPRPASSLRPPRCGVPDPSDGLSARNRQKRFVLSGGRWEKTDLTYRILRFPWQLVQEQVRQTMAEALKVWSDVTPLTFTEVHEGRADIMIDFARYWHGDDLPFDGPGGILAHAFFPKTHREGDVHFDYDETWTIGDDQGTDLLQVAAHEFGHVLGLQHTTAAKALMSAFYTFRYPLSLSPDDCRGVQHLYGQPWPTVTSRTPALGPQAGIDTNEIAPLEPDAPPDACEASFDAVSTIRGELFFFKAGFVWRLRGGQLQPGYPALASRHWQGLPSPVDAAFEDAQGHIWFFQGAQYWVYDGEKPVLGPAPLTELGLVRFPVHAALVWGPEKNKIYFFRGRDYWRFHPSTRRVDSPVPRRATDWRGVPSEIDAAFQDADGALGVRQLVGGGHSSRFSHLVVAGLPHACHRKSGSSSQVLCPEPSALLSVAG

SEQ ID NO: 365 - protein, 382 aa, Homo sapiens
MAPAAWLRSAAARALLPPMLLLLLQPPPLLARALPPDVHHLHAERRGPQPWHAALPSSPAPAPATQEAPRPASSLRPPRCGVPDPSDGLSARNRQKRFVLSGGRWEKTDLTYRILRFPWQLVQEQVRQTMAEALKVWSDVTPLTFTEVHEGRADIMIDFARYWHGDDLPFDGPGGILAHAFFPKTHREGDVHFDYDETWTIGDDQGTDLLQVAAHEFGHVLGLQHTTAAKALMSAFYTFRYPLSLSPDDCRGVQHLYGQPWPTVTSRTPALGPQAGIDTNEIAPLEPDAPPDACEASFDAVSTIRGELFFFKAGFVWRLRGGQLQPGYPALASRHWQGLPSPVDAAFEDAQGHIWFFQELGFPSSTGRDESLEHCRCQGLHK

SEQ ID NO: 366 - protein, 370 aa, Homo sapiens
MAPAAWLRSAAARALLPPMLLLLLQPPPLLARALPPDVHHLHAERRGPQPWHAALPSSPAPAPATQEAPRPASSLRPPRCGVPDPSDGLSARNRQKRFVLSGGRWEKTDLTYRILRFPWQLVQEQVRQTMAEALKVWSDVTPLTFTEVHEGRADIMIDFARYWHGDDLPFDGPGGILAHAFFPKTHREGDVHFDYDETWTIGDDQGTDLLQVAAHEFGHVLGLQHTTAAKALMSAFYTFRYPLSLSPDDCRGVQHLYGQPWPTVTSRTPALGPQAGIDTNEIAPLEPDAPPDACEASFDAVSTIRGELFFFKAGFVWRLRGGQLQPGYPALASRHWQGLPSPVDAAFEDAQGHIWFFQGTTGVSTPAPGV

SEQ ID NO: 367 - protein, 301 aa, Homo sapiens
MAPAAWLRSAAARALLPPMLLLLLQPPPLLARALPPDVHHLHAERRGPQPWHAALPSSPAPAPATQEAPRPASSLRPPRCGVPDPSDGLSARNRQKRFVLSGGRWEKTDLTYRILRFPWQLVQEQVRQTMAEALKVWSDVTPLTFTEVHEGRADIMIDFARYWHGDDLPFDGPGGILAHAFFPKTHREGDVHFDYDETWTIGDDQGTDLLQVAAHEFGHVLGLQHTTAAKALMSAFYTFRYPLSLSPDDCRGVQHLYGQPWPTVTSRTPALGPQAGIDTNEIAPLEVRPCLPVPLLLCWPL

SEQ ID NO: 368 - protein, 354 aa, Homo sapiens [sequence omitted]

SEQ ID NO: 369 - protein, 113 aa, Homo sapiens
MAPAAWLRSAAARALLPPMLLLLLQPPPLLARALPPDVHHLHAERRGPQPWHAALPSSPAPAPATQEAPRPASSLRPPRCGVPDPSDGLSARNRQKRFVLSGGRWEKTDLTYR

SEQ ID NO: 370 - DNA, 143 bp, Artificial sequence
  Synthetic oligonucleotide
tggcgcctccgtgggggccagctgcagcccggctacccagcattggcctctcgccactggcagggactgcccagccctgtggacgctgccttcgaggatgcccagggccacatttggttcttccaaggtgctcagtactgggt

SEQ ID NO: 371 - DNA, 21 bp, Artificial sequence
  Synthetic oligonucleotide
acccagtactgagcaccttgg

SEQ ID NO: 372 - DNA, 14 bp, Artificial sequence
  Synthetic oligonucleotide
tggcgcctccgtgg

SEQ ID NO: 373 - DNA, 143 bp, Homo sapiens; identical to SEQ ID NO: 370

SEQ ID NO: 374 - DNA, 21 bp, Homo sapiens
acccagtactgagcaccttgg

SEQ ID NO: 375 - DNA, 14 bp, Homo sapiens
tggcgcctccgtgg

SEQ ID NO: 376 - DNA, 25 bp, Artificial sequence
  Synthetic oligonucleotide
acatttggttcttccaagggactac

SEQ ID NO: 377 - DNA, 19 bp, Artificial sequence
  Synthetic oligonucleotide
tcgatctcagagggcaccc

SEQ ID NO: 378 - DNA, 111 bp, Artificial sequence
  Synthetic oligonucleotide
acatttggttcttccaagggactactggcgtttccaccccagcacccggcgtgtagacagtcccgtgccccgcagggccactgactggagaggggtgccctctgagatcga

SEQ ID NO: 379 - DNA, 20 bp, Artificial sequence
  Synthetic oligonucleotide
tctgctggccactgtgactg

SEQ ID NO: 380 - DNA, 21 bp, Artificial sequence
  Synthetic oligonucleotide
gaagaaaaagagctcgcctcg

SEQ ID NO: 381 - DNA, 136 bp, Artificial sequence
  Synthetic oligonucleotide
tctgctggccactgtgactgcagcatatgccctcagcatgtgtccctctctcccaccccagccagacgccccgccagatgcctgtgaggcctcctttgacgcggtctccaccatccgaggcgagctctttttcttc

SEQ ID NO: 382 - DNA, 22 bp, Artificial sequence
  Synthetic oligonucleotide
atttccatcctcaactggcaga

SEQ ID NO: 383 - DNA, 16 bp, Artificial sequence
  Synthetic oligonucleotide
tgccctggaacccacg

SEQ ID NO: 384 - DNA, 104 bp, Artificial sequence
  Synthetic oligonucleotide
atttccatcctcaactggcagagatgagagcctggagcattgcagatgccagggacttcacaaatgaaggcacagcatgggaaacctgcgtgggttccagggca

SEQ ID NO: 385 - DNA, 19 bp, Artificial sequence
  Synthetic oligonucleotide
cactgccccagcttatccc

SEQ ID NO: 386 - DNA, 21 bp, Artificial sequence
  Synthetic oligonucleotide
ctctcccagcctcagtttcct

SEQ ID NO: 387 - DNA, 108 bp, Artificial sequence
  Synthetic oligonucleotide
cactgccccagcttatcccaggcctcccgcttccctctgcgggtggggtgctgagcaggcattattggcctgcatgttttactgatgaggaaactgaggctgggagag

SEQ ID NO: 388 - DNA, 1364 bp, Homo sapiens
ccaaaatctatgggctgggacagcaaagatgtggcctacgaagagaaaggtctggagaatcagaaggccttcaaatggtggttccaaatccctccagcaaagcccatccatctttagagctcacccgtctccagctacaccccccacccctcccggcccagatcaggcagcggggtcgccctctccaggactctcaaggcagctaaggctggaggcgccggcgagcctggagagggaggagttcactaaattgtgttggatggaaggcgtcgaggaccggaggaattaatccgatgtggggaaggcggacggggctacgaggaaaaaagagggggcaatgtacactcagccttttcatcactcggcggggagatggatggttttccggaccgggcgtcccagcgccccggttagctatagggagacgtcagagcgctctggtccgcgatagaagagccccccagcccccccgcccgggcttccatataaagtaggggccctagtggaggccgcagcagtagcaccagcggctgcggcggcggagctcctccgaggtccgggtcaccagtctctgctcttcccagcctctccggcgcgctccaagggcttcccgtcgggaccatgcgcggcagtgagctcccgctggtcctgctggcgctggtcctctgcctggcgccccgggggcgagcggtcccgctgcctgcgggcggagggaccgtgctgaccaagatgtacccgcgcggcaaccactgggcggtggggcacttaatggggaaaaagagcacaggggagtcttcttctgtttctgagagagggagcctgaagcagcagctgagagagtacatcaggtgggaagaagctgcaaggaatttgctgggtctcatagaagcaaaggagaacagaaaccaccagccacctcaacccaaggccctgggcaatcagcagccttcgtgggattcagaggatagcagcaacttcaaagatttggtagactctctgctccaggttctcaacgtgaaggaaggaacccccagctgaaccagcaatgataatgatggcctctctcaaaagagaaaaacaaaacccctaagagactgcgttctgcaagcatcagttctacggatcatcaacaagatttccttgtgcaaaatatttgactattctgtatctttcatccttgactaaattcgtgattttcaagcagcatcttctggtttaaacttgtttgctgtgaacaattgtcgaaaagagtcttccaattaatgcttttttatatctaggctacctgttggttagattcaaggccccgagctgttaccattcacaataaaagcttaaacacattgtccaaagggcaggctgtt

SEQ ID NO: 389 - DNA, 1357 bp, Homo sapiens
ccaaaatctatgggctgggacagcaaagatgtggcctacgaagagaaaggtctggagaatcagaaggccttcaaatggtggttccaaatccctccagcaaagcccatccatctttagagctcacccgtctccagctacaccccccacccctcccggcccagatcaggcagcggggtcgccctctccaggactctcaaggcagctaaggctggaggcgccggcgagcctggagagggaggagttcactaaattgtgttggatggaaggcgtcgaggaccggaggaattaatccgatgtggggaaggcggacggggctacgaggaaaaaagagggggcaatgtacactcagccttttcatcactcggcggggagatggatggttttccggaccgggcgtcccagcgccccggttagctatagggagacgtcagagcgctctggtccgcgatagaagagccccccagcccccccgcccgggcttccatataaagtaggggccctagtggaggccgcagcagtagcaccagcggctgcggcggcggagctcctccgaggtccgggtcaccagtctctgctcttcccagcctctccggcgcgctccaagggcttcccgtcgggaccatgcgcggcagtgagctcccgctggtcctgctggcgctggtcctctgcctggcgccccgggggcgagcggtcccgctgcctgcgggcggagggaccgtgctgaccaagatgtacccgcgcggcaaccactgggcggtggggcacttaatggggaaaaagagcacaggggagtcttcttctgtttctgagagagggagcctgaagcagcagctgagagagtacatcaggtgggaagaagctgcaaggaatttgctgggtctcatagaagcaaaggagaacagaaaccaccagccacctcaacccaaggccctgggcaatcagcagccttcgtgggattcagaggatagcagcaacttcaaagatactctctgctccaggttctcaacgtgaaggaaggaacccccagctgaaccagcaatgataatgatggcctctctcaaaagagaaaaacaaaacccctaagagactgcgttctgcaagcatcagttctacggatcatcaacaagatttccttgtgcaaaatatttgactattctgtatctttcatccttgactaaattcgtgattttcaagcagcatcttctggtttaaacttgtttgctgtgaacaattgtcgaaaagagtcttccaattaatgcttttttatatctaggctacctgttggttagattcaaggccccgagctgttaccattcacaataaaagcttaaacacattgtccaaagggcaggctgtt

SEQ ID NO: 390 - DNA, 1798 bp, Homo sapiens
aagaaagtaaatgtgttcgttcttcacttttaagggactgctctcactgtctcatcaaatcagtacagagaataggaaggtcttttttctgaatatttgaaatgctccaaaggaagtgccaaatatagaaaaagcaacataaaatcaagaatcactcataaccttctgattaccctggcactttctatgaaggagtagagtaaagttggcccccacctggaatatagctcctccctacccccaacaatggaccctgcccattgcctcccagttccttgatcttcctaggttccacaactctctttttccttttagttttattccctccagccaaacctctcttattcaatattttgagccaatgggggagttatgtagatttttttccctacacattagctggccccttttatgaccaatgactcataaggcaagatgtgtggtggcatcttcggacaggcagcaggctttaatagggcagcctgggttggtggaggcaagcaaagctaattggcatgcgtgggaatcaaaccccaggccctgggctcattagcccatggtcaaaacaactgagccagaggaggtaataatttgcccaagaatatcagtagttcctttattagaagaaaatggctgatatggaagttggggaatctgaattgccagagaatcttgggaagagtaataagctcttagtctcaacaaaaagtgttttttcatctcagcgcgtaaagggtgctatatgggaacaaagaagtattttaaaattataactactcattctttctttagccttagttaatttgagcagaagccacaacaagcaaaccacaataaatttagaattggcagaaatccacattaactcctcttcccaagtttccacactactaccatttacagttgtaggtttgtaatgtataattatgtaatgcagaaactagctttgacttgtgtaacgatgcactgtcaaagtaagcaaagtaagaattgaaattccacattcccagaatttaacactcagctgctcctctagtaataagttcctggggataatacattaaccaacattggttgaaacatacctgagtaatcatatcaggatgcatgttaagctgataaaacaataagatcccaaaatgcagtagctcaaaaaaaagtagaagttaatttatctcctgggggacagctctggttctcaaattttacaggctcagaatcacctgcagggcttgtgaaagtacagattgctgcgctccgcccccagagtttctgatttagtaggtgttaggctgaaccaagaatttgcctttctaacaagctcccaagtgatgctgatgacttgtaggaatggatttacttctaggattagacttcagctcactctgtttgctgaactctttctaatatttcttaagttggtagactctctgctccaggttctcaacgtgaaggaaggaacccccagctgaaccagcaatgataatgatggcctctctcaaaagagaaaaacaaaacccctaagagactgcgttctgcaagcatcagttctacggatcatcaacaagatttccttgtgcaaaatatttgactattctgtatctttcatccttgactaaattcgtgattttcaagcagcatcttctggtttaaacttgtttgctgtgaacaattgtcgaaaagagtcttccaattaatgcttttttatatctaggctacctgttggttagattcaaggccccgagctgttaccattcacaataaaagcttaaacacattgtccaaagggcaggctgtt

SEQ ID NO: 391 - DNA, 1362 bp, Homo sapiens
ccaaaatctatgggctgggacagcaaagatgtggcctacgaagagaaaggtctggagaatcagaaggccttcaaatggtggttccaaatccctccagcaaagcccatccatctttagagctcacccgtctccagctacaccccccacccctcccggcccagatcaggcagcggggtcgccctctccaggactctcaaggcagctaaggctggaggcgccggcgagcctggagagggaggagttcactaaattgtgttggatggaaggcgtcgaggaccggaggaattaatccgatgtggggaaggcggacggggctacgaggaaaaaagagggggcaatgtacactcagccttttcatcactcggcggggagatggatggttttccggaccgggcgtcccagcgccccggttagctatagggagacgtcagagcgctctggtccgcgatagaagagccccccagcccccccgcccgggcttccatataaagtaggggccctagtggaggccgcagcagtagcaccagcggctgcggcggcggagctcctccgaggtccgggtcaccagtctctgctcttcccagcctctccggcgcgctccaagggcttcccgtcgggaccatgcgcggcagtgagctcccgctggtcctgctggcgctggtcctctgcctggcgccccgggggcgagcggtcccgctgcctgcgggcggagggaccgtgctgaccaagatgtacccgcgcggcaaccactgggcggtggggcacttaatggggaaaaagagcacaggggagtcttcttctgtttctgagagagggagcctgaagcagcagctgagagagtacatcaggtgggaagaagctgcaaggaatttgctgggtctcatagaagcaaaggagaacagaaaccaccagccacctcaacccaaggccctgggcaatcagcagccttcgtgggattcagaggatagcagcaacttcaaagatgtaggttcaaaaggcaaaggttctcaacgtgaaggaaggaacccccagctgaaccagcaatgataatgatggcctctctcaaaagagaaaaacaaaacccctaagagactgcgttctgcaagcatcagttctacggatcatcaacaagatttccttgtgcaaaatatttgactattctgtatctttcatccttgactaaattcgtgattttcaagcagcatcttctggtttaaacttgtttgctgtgaacaattgtcgaaaagagtcttccaattaatgcttttttatatctaggctacctgttggttagattcaaggccccgagctgttaccattcacaataaaagcttaaacacattgtccaaagggcaggctgtt

SEQ ID NO: 392 - DNA, 1376 bp, Homo sapiens
ccaaaatctatgggctgggacagcaaagatgtggcctacgaagagaaaggtctggagaatcagaaggccttcaaatggtggttccaaatccctccagcaaagcccatccatctttagagctcacccgtctccagctacaccccccacccctcccggcccagatcaggcagcggggtcgccctctccaggactctcaaggcagctaaggctggaggcgccggcgagcctggagagggaggagttcactaaattgtgttggatggaaggcgtcgaggaccggaggaattaatccgatgtggggaaggcggacggggctacgaggaaaaaagagggggcaatgtacactcagccttttcatcactcggcggggagatggatggttttccggaccgggcgtcccagcgccccggttagctatagggagacgtcagagcgctctggtccgcgatagaagagccccccagcccccccgcccgggcttccatataaagtaggggccctagtggaggccgcagcagtagcaccagcggctgcggcggcggagctcctccgaggtccgggtcaccagtctctgctcttcccagcctctccggcgcgctccaagggcttcccgtcgggaccatgcgcggcagtgagctcccgctggtcctgctggcgctggtcctctgcctggcgccccgggggcgagcggtcccgctgcctgcgggcggagggaccgtgctgaccaagatgtacccgcgcggcaaccactgggcggtggggcacttaatggggaaaaagagcacaggggagtcttcttctgtttctgagagagggagcctgaagcagcagctgagagagtacatcaggtgggaagaagctgcaaggaatttgctgggtctcatagaagcaaaggagaacagaaaccaccagccacctcaacccaaggccctgggcaatcagcagccttcgtgggattcagaggatagcagcaacttcaaagatgtaggttcaaaaggcaaagactctctgctccaggttctcaacgtgaaggaaggaacccccagctgaaccagcaatgataatgatggcctctctcaaaagagaaaaacaaaacccctaagagactgcgttctgcaagcatcagttctacggatcatcaacaagatttccttgtgcaaaatatttgactattctgtatctttcatccttgactaaattcgtgattttcaagcagcatcttctggtttaaacttgtttgctgtgaacaattgtcgaaaagagtcttccaattaatgcttttttatatctaggctacctgttggttagattcaaggccccgagctgttaccattcacaataaaagcttaaacacattgtccaaagggcaggctgtt

SEQ ID NO: 393 - DNA, 760 bp, Artificial sequence
  Synthetic oligonucleotide
ccaaaatctatgggctgggacagcaaagatgtggcctacgaagagaaaggtctggagaatcagaaggccttcaaatggtggttccaaatccctccagcaaagcccatccatctttagagctcacccgtctccagctacaccccccacccctcccggcccagatcaggcagcggggtcgccctctccaggactctcaaggcagctaaggctggaggcgccggcgagcctggagagggaggagttcactaaattgtgttggatggaaggcgtcgaggaccggaggaattaatccgatgtggggaaggcggacggggctacgaggaaaaaagagggggcaatgtacactcagccttttcatcactcggcggggagatggatggttttccggaccgggcgtcccagcgccccggttagctatagggagacgtcagagcgctctggtccgcgatagaagagccccccagcccccccgcccgggcttccatataaagtaggggccctagtggaggccgcagcagtagcaccagcggctgcggcggcggagctcctccgaggtccgggtcaccagtctctgctcttcccagcctctccggcgcgctccaagggcttcccgtcgggaccatgcgcggcagtgagctcccgctggtcctgctggcgctggtcctctgcctggcgccccgggggcgagcggtcccgctgcctgcgggcggagggaccgtgctgaccaagatgtacccgcgcggcaaccactgggcggtgg

SEQ ID NO: 394 - DNA, 224 bp, Artificial sequence
  Synthetic oligonucleotide
ggcacttaatggggaaaaagagcacaggggagtcttcttctgtttctgagagagggagcctgaagcagcagctgagagagtacatcaggtgggaagaagctgcaaggaatttgctgggtctcatagaagcaaaggagaacagaaaccaccagccacctcaacccaaggccctgggcaatcagcagccttcgtgggattcagaggatagcagcaacttcaaagat

SEQ ID NO: 395 - DNA, 1418 bp, Artificial sequence
  Synthetic oligonucleotide
aagaaagtaaatgtgttcgttcttcacttttaagggactgctctcactgtctcatcaaatcagtacagagaataggaaggtcttttttctgaatatttgaaatgctccaaaggaagtgccaaatatagaaaaagcaacataaaatcaagaatcactcataaccttctgattaccctggcactttctatgaaggagtagagtaaagttggcccccacctggaatatagctcctccctacccccaacaatggaccctgcccattgcctcccagttccttgatcttcctaggttccacaactctctttttccttttagttttattccctccagccaaacctctcttattcaatattttgagccaatgggggagttatgtagatttttttccctacacattagctggccccttttatgaccaatgactcataaggcaagatgtgtggtggcatcttcggacaggcagcaggctttaatagggcagcctgggttggtggaggcaagcaaagctaattggcatgcgtgggaatcaaaccccaggccctgggctcattagcccatggtcaaaacaactgagccagaggaggtaataatttgcccaagaatatcagtagttcctttattagaagaaaatggctgatatggaagttggggaatctgaattgccagagaatcttgggaagagtaataagctcttagtctcaacaaaaagtgttttttcatctcagcgcgtaaagggtgctatatgggaacaaagaagtattttaaaattataactactcattctttctttagccttagttaatttgagcagaagccacaacaagcaaaccacaataaatttagaattggcagaaatccacattaactcctcttcccaagtttccacactactaccatttacagttgtaggtttgtaatgtataattatgtaatgcagaaactagctttgacttgtgtaacgatgcactgtcaaagtaagcaaagtaagaattgaaattccacattcccagaatttaacactcagctgctcctctagtaataagttcctggggataatacattaaccaacattggttgaaacatacctgagtaatcatatcaggatgcatgttaagctgataaaacaataagatcccaaaatgcagtagctcaaaaaaaagtagaagttaatttatctcctgggggacagctctggttctcaaattttacaggctcagaatcacctgcagggcttgtgaaagtacagattgctgcgctccgcccccagagtttctgatttagtaggtgttaggctgaaccaagaatttgcctttctaacaagctcccaagtgatgctgatgacttgtaggaatggatttacttctaggattagacttcagctcactctgtttgctgaactctttctaatatttcttaag

SEQ ID NO: 396 - DNA, 359 bp, Artificial sequence
  Synthetic oligonucleotide
gttctcaacgtgaaggaaggaacccccagctgaaccagcaatgataatgatggcctctctcaaaagagaaaaacaaaacccctaagagactgcgttctgcaagcatcagttctacggatcatcaacaagatttccttgtgcaaaatatttgactattctgtatctttcatccttgactaaattcgtgattttcaagcagcatcttctggtttaaacttgtttgctgtgaacaattgtcgaaaagagtcttccaattaatgcttttttatatctaggctacctgttggttagattcaaggccccgagctgttaccattcacaataaaagcttaaacacattgtccaaagggcaggctgtt

SEQ ID NO: 397 - DNA, 19 bp, Artificial sequence
  Synthetic oligonucleotide
gtaggttcaaaaggcaaag

SEQ ID NO: 398 - DNA, 7 bp, Artificial sequence
  Synthetic oligonucleotide
ttggtag

SEQ ID NO: 399 - DNA, 14 bp, Artificial sequence
  Synthetic oligonucleotide
actctctgctccag

SEQ ID NO: 400 - protein, 148 aa, Homo sapiens
MRGSELPLVLLALVLCLAPRGRAVPLPAGGGTVLTKMYPRGNHWAVGHLMGKKSTGESSSVSERGSLKQQLREYIRWEEAARNLLGLIEAKENRNHQPPQPKALGNQQPSWDSEDSSNFKDVGSKGKVGRLSAPGSQREGRNPQLNQQ

SEQ ID NO: 401 - protein, 138 aa, Homo sapiens [sequence omitted]

SEQ ID NO: 402 - protein, 129 aa, Homo sapiens
MRGSELPLVLLALVLCLAPRGRAVPLPAGGGTVLTKMYPRGNHWAVGHLMGKKSTGESSSVSERGSLKQQLREYIRWEEAARNLLGLIEAKENRNHQPPQPKALGNQQPSWDSEDSSNFKDTLCSRFST

SEQ ID NO: 403 - protein, 141 aa, Homo sapiens [sequence omitted]

SEQ ID NO: 404 - protein, 142 aa, Homo sapiens
MRGSELPLVLLALVLCLAPRGRAVPLPAGGGTVLTKMYPRGNHWAVGHLMGKKSTGESSSVSERGSLKQQLREYIRWEEAARNLLGLIEAKENRNHQPPQPKALGNQQPSWDSEDSSNFKDVGSKGKDSLLQVLNVKEGTPS

SEQ ID NO: 405 - DNA, 20 bp, Artificial sequence
  Synthetic oligonucleotide
gtgggaagaagctgcaagga

SEQ ID NO: 406 - DNA, 19 bp, Artificial sequence
  Synthetic oligonucleotide
ccacgaaggctgctgattg

SEQ ID NO: 407 - DNA, 106 bp, Artificial sequence
  Synthetic oligonucleotide
gtgggaagaagctgcaaggaatttgctgggtctcatagaagcaaaggagaacagaaaccaccagccacctcaacccaaggccctgggcaatcagcagccttcgtgg

SEQ ID NO: 408 - DNA, 18 bp, Homo sapiens
accagccacctcaaccca

SEQ ID NO: 409 - DNA, 22 bp, Homo sapiens
ctggagcagagagtctttgcct

SEQ ID NO: 410 - DNA, 110 bp, Homo sapiens
accagccacctcaacccaaggccctgggcaatcagcagccttcgtgggattcagaggatagcagcaacttcaaagatgtaggttcaaaaggcaaagactctctgctccag

SEQ ID NO: 411 - DNA, 751 bp, Homo sapiens
ccagaaacatccagaatacatttccaacaagagcactggccaagtcagcttcttctgagagagtctctagaagacatgatgctacactcagctttgggtctctgcctcttactcgtcacagtttcttccaaccttgccattgcaataaaaaaggaaaagaggcctcctcagacactctcaagaggatggggagatgacatcacttgggtacaaacttatgaagaaggtctcttttatgctcaaaaaagtaagaagccattaatggttattcatcacctggaggattgtcaatactctcaagcactaaagaaagtatttgcccaaaatgaagaaatacaagaaatggctcagaataagttcatcatgctaaaccttatgcatgaaaccactgataagaatttatcacctgatgggcaatatgtgcctagaatcatgtttgtagacccttctttaacagttagagctgacatagctggaagatactctaacagattgtacacatatgagcctcgggatttacccctataagaaatttggatacagagacatgcatacagaaggaatgccatgtgagcaggaagcagagtgtgatcgtgcagcagaagccaaggaatgctcaaggttgtcagcaaacacactggatgacaggcacggaaaagattctccttcacagccctcggaaggaaccaaccctgccaacaccttgatctcagatctctaccctccagatctgtgagacaataaattgact

SEQ ID NO: 412 - DNA, 1526 bp, Homo sapiens
ccagaaacatccagaatacatttccaacaagagcactggccaagtcagcttcttctgagagagtctctagaagacatgatgctacactcagctttgggtctctgcctcttactcgtcacagtttcttccaaccttgccattgcaataaaaaaggaaaagaggcctcctcagacactctcaagaggatggggagatgacatcacttgggtacaaacttatgaagaaggtctcttttatgctcaaaaaagtaagaagccattaatggttattcatcacctggaggattgtcaatactctcaagcactaaagaaagtatttgcccaaaatgaagaaatacaagaaatggctcagaataagttcatcatgctaaaccttatgcatgaaaccactgataagaatttatcacctgatgggcaatatgtgcctagaatcatgtttgtaggtatgtatgtgatctcatttcatcagatctacaaaattagtagaaatcagcattcttgcttttatttttaaatgctagttcaagtactattctttttaaagagaagtcatttctaatccaataatatcagctcttgttagttctacaatcaaaatccactatatctgtaatttgaaaattttaaatattttttcaaagcatgtatgctattaaatctatatcccaatgtactttcaacacagtgccccagactagattgacagagacctatgacacactaaaaggagaattcaggttaattcatgaactgacatgtatgaaaactaattttgcttataaattggtttgacatttgttttagattaagaaacaaaaatgattttaagaacgttttatggatgtagccagaggccattatcctaagcaaatgaacacagaaacagaaaaccaaatagtgaatgttcacacatataaatatgagctaaacactggttacacatggacataaagagaggaaaaatagacaataggaactccaaaacgggggaaggagggagggagccaaaggatgaaaaactaactgttggctactatgttcactattagggtgttgggttcagctgaagcccaaacttcagcatcacacaatatatctgtgtaacaaacttgtacacataacccccacatataaaataataattaagtttttacaagagtaaagaaaagaacatgctaaattatactttcgtgacttggttttttccttgacagacccttctttaacagttagagctgacatagctggaagatactctaacagattgtacacatatgagcctcgggatttacccctattgatagaaaacatgaagaaagcattaagacttattcagtcagagctataagagatgatagaaaaaagccttcacttcaaagaagtcaaatttcatgaagaaaacctctggcacattgacaaatactaaatgtgcaagtatatagattttgtaatattactatttagtttttttaatgtgtttgcaatagtcttattaaaataaatgttttttaaatctgagactgacaa

SEQ ID NO: 413 - DNA, 751 bp, Homo sapiens
ccagaaacatccagaatacatttccaacaagagcactggccaagtcagcttcttctgagagagtctctagaagacatgatgctacactcagctttgggtctctgcctcttactcgtcacagtttcttccaaccttgccattgcaataaaaaaggaaaagaggcctcctcagacactctcaagaggatggggagatgacatcacttgggtacaaacttatgaagaaggtctcttttatgctcaaaaaagaagccattaatggttattcatcacctggaggattgtcaatactctcaagcactaaagaaagtatttgcccaaaatgaagaaatacaagaaatggctcagaataagttcatcatgctaaaccttatgcatgaaaccactgataagaatttatcacctgatgggcaatatgtgcctagaatcatgtttgtagacccttctttaacagttagagctgacatagctggaagatactctaacagattgtacacatatgagcctcgggatttacccctattgatagaaaacatgaagaaagcattaagacttattcagtcagagctataagagatgatagaaaaaagccttcacttcaaagaagtcaaatttcatgaagaaaacctctggcacattgacaaatactaaatgtgcaagtatatagattttgtaatattactatttagtttttttaatgtgtttgcaatagtcttattaaaataaatgttttttaaatctgagactgacaa

SEQ ID NO: 414 - DNA, 136 bp, Artificial sequence
  Synthetic oligonucleotide
cttcttctgagagagtctctagaagacatgatgctacactcagctttgggtctctgcctcttactcgtcacagtttcttccaaccttgccattgcaataaaaaaggaaaagaggcctcctcagacactctcaagag

SEQ ID NO: 415 - DNA, 361 bp, Artificial sequence
  Synthetic oligonucleotide
gtatgtatgtgatctcatttcatcagatctacaaaattagtagaaatcagcattcttgcttttatttttaaatgctagttcaagtactattctttttaaagagaagtcatttctaatccaataatatcagctcttgttagttctacaatcaaaatccactatatctgtaatttgaaaattttaaatattttttcaaagcatgtatgctattaaatctatatcccaatgtactttcaacacagtgccccagactagattgacagagacctatgacacactaaaaggagaattcaggttaattcatgaactgacatgtatgaaaactaattttgcttataaattggtttgacatttgttttag

SEQ ID NO: 416 - DNA, 410 bp, Artificial sequence
  Synthetic oligonucleotide
attaagaaacaaaaatgattttaagaacgttttatggatgtagccagaggccattatcctaagcaaatgaacacagaaacagaaaaccaaatagtgaatgttcacacatataaatatgagctaaacactggttacacatggacataaagagaggaaaaatagacaataggaactccaaaacgggggaaggagggagggagccaaaggatgaaaaactaactgttggctactatgttcactattagggtgttgggttcagctgaagcccaaacttcagcatcacacaatatatctgtgtaacaaacttgtacacataacccccacatataaaataataattaagtttttacaagagtaaagaaaagaacatgctaaattatactttcgtgacttggttttttccttgacag

SEQ ID NO: 417 - DNA, 229 bp, Artificial sequence
  Synthetic oligonucleotide
tgatagaaaacatgaagaaagcattaagacttattcagtcagagctataagagatgatagaaaaaagccttcacttcaaagaagtcaaatttcatgaagaaaacctctggcacattgacaaatactaaatgtgcaagtatatagattttgtaatattactatttagtttttttaatgtgtttgcaatagtcttattaaaataaatgttttttaaatctgagactgacaa

SEQ ID NO: 418 - DNA, 225 bp, Artificial sequence
  Synthetic oligonucleotide
aagaaatttggatacagagacatgcatacagaaggaatgccatgtgagcaggaagcagagtgtgatcgtgcagcagaagccaaggaatgctcaaggttgtcagcaaacacactggatgacaggcacggaaaagattctccttcacagccctcggaaggaaccaaccctgccaacaccttgatctcagatctctaccctccagatctgtgagacaataaattgact

SEQ ID NO: 419 - DNA, 48 bp, Artificial sequence
  Synthetic oligonucleotide
ccagaaacatccagaatacatttccaacaagagcactggccaagtcag

SEQ ID NO: 420 - DNA, 64 bp, Artificial sequence
  Synthetic oligonucleotide
gatggggagatgacatcacttgggtacaaacttatgaagaaggtctcttttatgctcaaaaaag

SEQ ID NO: 421 - DNA, 4 bp, Artificial sequence
  Synthetic oligonucleotide
taag

SEQ ID NO: 422 - DNA, 49 bp, Artificial sequence
  Synthetic oligonucleotide
aagccattaatggttattcatcacctggaggattgtcaatactctcaag

SEQ ID NO: 423 - DNA, 77 bp, Artificial sequence
  Synthetic oligonucleotide
cactaaagaaagtatttgcccaaaatgaagaaatacaagaaatggctcagaataagttcatcatgctaaaccttatg

SEQ ID NO: 424 - DNA, 64 bp, Artificial sequence
  Synthetic oligonucleotide
catgaaaccactgataagaatttatcacctgatgggcaatatgtgcctagaatcatgtttgtag

SEQ ID NO: 425 - DNA, 84 bp, Artificial sequence
  Synthetic oligonucleotide
acccttctttaacagttagagctgacatagctggaagatactctaacagattgtacacatatgagcctcgggatttacccctat

SEQ ID NO: 426 - protein, 166 aa, Homo sapiens
MMLHSALGLCLLLVTVSSNLAIAIKKEKRPPQTLSRGWGDDITWVQTYEEGLFYAQKSKKPLMVIHHLEDCQYSQALKKVFAQNEEIQEMAQNKFIMLNLMHETTDKNLSPDGQYVPRIMFVDPSLTVRADIAGRYSNRLYTYEPRDLPLLIENMKKALRLIQSEL

SEQ ID NO: 427 - protein, 150 aa, Homo sapiens
MMLHSALGLCLLLVTVSSNLAIAIKKEKRPPQTLSRGWGDDITWVQTYEEGLFYAQKSKKPLMVIHHLEDCQYSQALKKVFAQNEEIQEMAQNKFIMLNLMHETTDKNLSPDGQYVPRIMFVDPSLTVRADIAGRYSNRLYTYEPRDLPL

SEQ ID NO: 428 - protein, 145 aa, Homo sapiens
MMLHSALGLCLLLVTVSSNLAIAIKKEKRPPQTLSRGWGDDITWVQTYEEGLFYAQKSKKPLMVIHHLEDCQYSQALKKVFAQNEEIQEMAQNKFIMLNLMHETTDKNLSPDGQYVPRIMFVGMYVISFHQIYKISRNQHSCFYF

SEQ ID NO: 429 - protein, 60 aa, Homo sapiens
MMLHSALGLCLLLVTVSSNLAIAIKKEKRPPQTLSRGWGDDITWVQTYEEGLFYAQKRSH

SEQ ID NO: 430 - DNA, 28 bp, Artificial sequence
  Synthetic oligonucleotide
aaagcattaagacttattcagtcagagc

SEQ ID NO: 431 - DNA, 23 bp, Artificial sequence
  Synthetic oligonucleotide
tcaatgtgccagaggttttcttc

SEQ ID NO: 432 - DNA, 101 bp, Artificial sequence
  Synthetic oligonucleotide
aaagcattaagacttattcagtcagagctataagagatgatagaaaaaagccttcacttcaaagaagtcaaatttcatgaagaaaacctctggcacattga

SEQ ID NO: 433 - DNA, 2492 bp, Homo sapiens
ctgaagggacccccctcggagcccgcccacgcgagatgaggacggtggcccagcccccccatgccctccccctgggggccgcccccgctcccgccccgtgcgcttcctgggtggggccgggggcggcttcaaaaccccctgccgacccagccggtccccgccgccgccgcccttcgcgccctgggccatctccctcccacctccctccgcggagcagccagacagcgagggccccggccgggggcaggggggacgccccgtccggggcacccccccggctctgagccgcccgcggggccggcctcggcccggagcggaggaaggagtcgccgaggagcagcctgaggccccagagtctgagacgagccgccgccgcccccgccactgcggggaggagggggaggaggagcgggaggagggacgagctggtcgggagaagaggaaaaaaacttttgagacttttccgttgccgctgggagccggaggcgcggggacctcttggcgcgacgctgccccgcgaggaggcaggacttggggaccccagaccgcctccctttgccgccggggacgcttgctccctccctgccccctacacggcgtccctcaggcgcccccattccggaccagccctcgggagtcgccgacccggcctcccgcaaagacttttccccagacctcgggcgcaccccctgcacgccgccttcatccccggcctgtctcctgagcccccgcgcatcctagaccctttctcctccaggagacggatctctctccgacctgccacagatcccctattcaagaccacccaccttctggtaccagatcgcgcccatctaggttatttccgtgggatactgagacacccccggtccaagcctcccctccaccactgcgcccttctccctgaggacctcagctttccctcgaggccctcctaccttttgccgggagacccccagcccctgcaggggcggggcctccccaccacaccagccctgttcgcgctctcggcagtgccggggggcgccgcctcccccatgccgccctccgggctgcggctgctgctgctgctgctaccgctgctgtggctactggtgctgacgcctggccggccggccgcgggactatccacctgcaagactatcgacatggagctggtgaagcggaagcgcatcgaggccatccgcggccagatcctgtccaagctgcggctcgccagccccccgagccagggggaggtgccgcccggcccgctgcccgaggccgtgctcgccctgtacaacagcacccgcgaccgggtggccggggagagtgcagaaccggagcccgagcctgaggccgactactacgccaaggaggtcacccgcgtgctaatggtggaaacccacaacgaaatctatgacaagttcaagcagagtacacacagcatatatatgttcttcaacacatcagagctccgagaagcggtacctgaacccgtgttgctctcccgggcagagctgcgtctgctgaggctcaagttaaaagtggagcagcacgtggagctgtaccagaaatacagcaacaattcctggcgatacctcagcaaccggctgctggcacccagcgactcgccagagtggttatcttttgatgtcaccggagttgtgcggcagtggttgagccgtggaggggaaattgagggctttcgccttagcgcccactgctcctgtgacagcagggataacacactgcaagtggacatcaacggtgaggcctgcttccccggccatgcccagttgtgacgtgtgtgcgtgtgtgtgttcccatctgccccacgccccacttatctatccctctgagagtgtgtgtgtatgtcccctatcccctgactcccacaccaaagcagggttcactaccggccgccgaggtgacctggccaccattcatggcatgaaccggcctttcctgcttctcatggccaccccgctggagagggcccagcatctgcaaagctcccggcaccgccgagccctggacaccaactattgcttcagctccacggagaagaactgctgcgtgcggcagctgtacattgacttccgcaaggacctcggctggaagtggatccacgagcccaagggctaccatgccaacttctgcctcgggccctgcccctacatttggagcctggacacgcagtacagcaaggtcctggccctgtacaaccagcataacccgggcgcctcggcggcgccgtgctgcgtgccgcaggcgctggagccgctgcccatcgtgtactacgtgggccgcaagcccaaggtggagcagctgtccaacatgatcgtgcgctcctgcaagtgcagctgaggtcccgccccgccccgccccgccccggcaggcccggccccaccccgccccgcccccgctgccttgcccatgggggctgtatttaaggacacccgtgccccaagcccacctggggccccattaaagatggagagaggactgcg

SEQ ID NO: 434 - DNA, 2441 bp, Homo sapiens
ctgaagggacccccctcggagcccgcccacgcgagatgaggacggtggcccagcccccccatgccctccccctgggggccgcccccgctcccgccccgtgcgcttcctgggtggggccgggggcggcttcaaaaccccctgccgacccagccggtccccgccgccgccgcccttcgcgccctgggccatctccctcccacctccctccgcggagcagccagacagcgagggccccggccgggggcaggggggacgccccgtccggggcacccccccggctctgagccgcccgcggggccggcctcggcccggagcggaggaaggagtcgccgaggagcagcctgaggccccagagtctgagacgagccgccgccgcccccgccactgcggggaggagggggaggaggagcgggaggagggacgagctggtcgggagaagaggaaaaaaacttttgagacttttccgttgccgctgggagccggaggcgcggggacctcttggcgcgacgctgccccgcgaggaggcaggacttggggaccccagaccgcctccctttgccgccggggacgcttgctccctccctgccccctacacggcgtccctcaggcgcccccattccggaccagccctcgggagtcgccgacccggcctcccgcaaagacttttccccagacctcgggcgcaccccctgcacgccgccttcatccccggcctgtctcctgagcccccgcgcatcctagaccctttctcctccaggagacggatctctctccgacctgccacagatcccctattcaagaccacccaccttctggtaccagatcgcgcccatctaggttatttccgtgggatactgagacacccccggtccaagcctcccctccaccactgcgcccttctccctgaggacctcagctttccctcgaggccctcctaccttttgccgggagacccccagcccctgcaggggcggggcctccccaccacaccagccctgttcgcgctctcggcagtgccggggggcgccgcctcccccatgccgccctccgggctgcggctgctgctgctgctgctaccgctgctgtggctactggtgctgacgcctggccggccggccgcgggactatccacctgcaagactatcgacatggagctggtgaagcggaagcgcatcgaggccatccgcggccagatcctgtccaagctgcggctcgccagccccccgagccagggggaggtgccgcccggcccgctgcccgaggccgtgctcgccctgtacaacagcacccgcgaccgggtggccggggagagtgcagaaccggagcccgagcctgaggccgactactacgccaaggaggtcacccgcgtgctaatggtggaaacccacaacgaaatctatgacaagttcaagcagagtacacacagcatatatatgttcttcaacacatcagagctccgagaagcggtacctgaacccgtgttgctctcccgggcagagctgcgtctgctgaggctcaagttaaaagtggagcagcacgtggagctgtaccagaaatacagcaacaattcctggcgatacctcagcaaccggctgctggcacccagcgactcgccagagtggttatcttttgatgtcaccggagttgtgcggcagtggttgagccgtggaggggaaattgagggctttcgccttagcgcccactgctcctgtgacagcagggataacacactgcaagtggacatcaacgggttcactaccggccgccgaggtgacctggccaccattcatggcatgaaccggcctttcctgcttctcatggccaccccgctggagagggcccagcatctgcaaagctcccggcaccgccgagccctggacaccaactattgcttcagctccacggagaagaactgctgcgtgcggcagctgtacattgacttccgcaaggacctcggctggaagtggatccacgagcccaagggctaccatgccaacttctgcctcgggccctgcccctacatttggagcctggacacgcagtacagcaaggtacgtctggcccaccgggctacgagatgcgcttggggggagccaggacggaggaagaggagagagaaagagaagtaaagtcagagaggtcctggccctgtacaaccagcataacccgggcgcctcggcggcgccgtgctgcgtgccgcaggcgctggagccgctgcccatcgtgtactacgtgggccgcaagcccaaggtggagcagctgtccaacatgatcgtgcgctcctgcaagtgcagctgaggtcccgccccgccccgccccgccccggcaggcccggccccaccccgccccgcccccgctgccttgcccatgggggctgtatttaaggacacccgtgccccaagcccacctggggccccattaaagatggagagaggactgcg

SEQ ID NO: 435 - DNA, 2317 bp, Homo sapiens
ctgaagggacccccctcggagcccgcccacgcgagatgaggacggtggcccagcccccccatgccctccccctgggggccgcccccgctcccgccccgtgcgcttcctgggtggggccgggggcggcttcaaaaccccctgccgacccagccggtccccgccgccgccgcccttcgcgccctgggccatctccctcccacctccctccgcggagcagccagacagcgagggccccggccgggggcaggggggacgccccgtccggggcacccccccggctctgagccgcccgcggggccggcctcggcccggagcggaggaaggagtcgccgaggagcagcctgaggccccagagtctgagacgagccgccgccgcccccgccactgcggggaggagggggaggaggagcgggaggagggacgagctggtcgggagaagaggaaaaaaacttttgagacttttccgttgccgctgggagccggaggcgcggggacctcttggcgcgacgctgccccgcgaggaggcaggacttggggaccccagaccgcctccctttgccgccggggacgcttgctccctccctgccccctacacggcgtccctcaggcgcccccattccggaccagccctcgggagtcgccgacccggcctcccgcaaagacttttccccagacctcgggcgcaccccctgcacgccgccttcatccccggcctgtctcctgagcccccgcgcatcctagaccctttctcctccaggagacggatctctctccgacctgccacagatcccctattcaagaccacccaccttctggtaccagatcgcgcccatctaggttatttccgtgggatactgagacacccccggtccaagcctcccctccaccactgcgcccttctccctgaggacctcagctttccctcgaggccctcctaccttttgccgggagacccccagcccctgcaggggcggggcctccccaccacaccagccctgttcgcgctctcggcagtgccggggggcgccgcctcccccatgccgccctccgggctgcggctgctgctgctgctgctaccgctgctgtggctactggtgctgacgcctggccggccggccgcgggactatccacctgcaagactatcgacatggagctggtgaagcggaagcgcatcgaggccatccgcggccagatcctgtccaagctgcggctcgccagccccccgagccagggggaggtgccgcccggcccgctgcccgaggccgtgctcgccctgtacaacagcacccgcgaccgggtggccggggagagtgcagaaccggagcccgagcctgaggccgactactacgccaaggaggtcacccgcgtgctaatggtggaaacccacaacgaaatctatgacaagttcaagcagagtacacacagcatatatatgttcttcaacacatcagagctccgagaagcggtacctgaacccgtgttgctctcccgggcagagctgcgtctgctgaggctcaagttaaaagtggagcagcacgtggagctgtaccagaaatacagcaacaattcctggcgatacctcagcaaccggctgctggcacccagcgactcgccagagtggttatcttttgatgtcaccggagttgtgcggcagtggttgagccgtggaggggaaattgagggctttcgccttagcgcccactgctcctgtgacagcagggataacacactgcaagtggacatcaacgggttcactaccggccgccgaggtgacctggccaccattcatggcatgaaccggcctttcctgcttctcatggccaccccgctggagagggcccagcatctgcaaagctcccggcaccgccgagccctggacaccaactattgcttcagctccacggagaagaactgctgcgtgcggcagctgtacattgacttccgcaaggacctcggctggaagtggatccacgagcccaagggctaccatgccaacttctgcctcgggccctgcccctacatttggagcctggacacgcagtacagcaagctcaatgaacagaacctcatccaggaagtccccaacatctggcaacgtgaagttggctaggaggaaggaagtgccccaaagagaacaagaagaagaggaccctgcattgacgttcctctgggaagcactcatttcctacctttcatttctaagaccgcatgatctgggacatccttcccttcctcgtcggttcgctttattgttcggtcttttaggtcctcgtcagtgggacaaattacaatagctttgcgctggaagccttcaaa

SEQ ID NO: 436 - DNA, 2466 bp, Homo sapiens
ctgaagggacccccctcggagcccgcccacgcgagatgaggacggtggcccagcccccccatgccctccccctgggggccgcccccgctcccgccccgtgcgcttcctgggtggggccgggggcggcttcaaaaccccctgccgacccagccggtccccgccgccgccgcccttcgcgccctgggccatctccctcccacctccctccgcggagcagccagacagcgagggccccggccgggggcaggggggacgccccgtccggggcacccccccggctctgagccgcccgcggggccggcctcggcccggagcggaggaaggagtcgccgaggagcagcctgaggccccagagtctgagacgagccgccgccgcccccgccactgcggggaggagggggaggaggagcgggaggagggacgagctggtcgggagaagaggaaaaaaacttttgagacttttccgttgccgctgggagccggaggcgcggggacctcttggcgcgacgctgccccgcgaggaggcaggacttggggaccccagaccgcctccctttgccgccggggacgcttgctccctccctgccccctacacggcgtccctcaggcgcccccattccggaccagccctcgggagtcgccgacccggcctcccgcaaagacttttccccagacctcgggcgcaccccctgcacgccgccttcatccccggcctgtctcctgagcccccgcgcatcctagaccctttctcctccaggagacggatctctctccgacctgccacagatcccctattcaagaccacccaccttctggtaccagatcgcgcccatctaggttatttccgtgggatactgagacacccccggtccaagcctcccctccaccactgcgcccttctccctgaggacctcagctttccctcgaggccctcctaccttttgccgggagacccccagcccctgcaggggcggggcctccccaccacaccagccctgttcgcgctctcggcagtgccggggggcgccgcctcccccatgccgccctccgggctgcggctgctgctgctgctgctaccgctgctgtggctactggtgctgacgcctggccggccggccgcgggactatccacctgcaagactatcgacatggagctggtgaagcggaagcgcatcgaggccatccgcggccagatcctgtccaagctgcggctcgccagccccccgagccagggggaggtgccgcccggcccgctgcccgaggccgtgctcgccctgtacaacagcacccgcgaccgggtggccggggagagtgcagaaccggagcccgagcctgaggccgactactacgccaaggaggtcacccgcgtgctaatggtggaaacccacaacgaaatctatgacaagttcaagcagagtacacacagcatatatatgttcttcaacacatcagagctccgagaagcggtacctgaacccgtgttgctctcccgggcagagctgcgtctgctgaggctcaagttaaaagtggagcagcacgtggagctgtaccagaaatacagcaacaattcctggcgatacctcagcaaccggctgctggcacccagcgactcgccagagtggttatcttttgatgtcaccggagttgtgcggcagtggttgagccgtggaggggaaattgagggctttcgccttagcgcccactgctcctgtgacagcagggataacacactgcaagtggacatcaacgggttcactaccggccgccgaggtgacctggccaccattcatggcatgaaccggcctttcctgcttctcatggccaccccgctggagagggcccagcatctgcaaagctcccggcaccgccgagccctggacaccaactattgcttcagctccacggagaagaactgctgcgtgcggcagctgtacattgacttccgcaaggacctcggctggaagtggatccacgagcccaagggctaccatgccaacttctgcctcgggccctgcccctacatttggagcctggacacgcagtacagcaagctcaatgaacagaacctcatccaggaagtccccaacatctggcaacgtgaagttggctaggaggaaggaagtgccccaaagagaacaagaagaagaggtcagtaccttctgaagtctggtcccctccacccagaagagtggccttccagaagggagaaggtgaagaaaactggaatagtgaataagaaagacatagacagaagggcgggcgcggtggctcacgcctgtaatcccagcactttgggaggccgaggcgggtggatcacctgaggtcaggagttcaagaccagcctggccaacatggcaaaaccccatctctactaaaaatacaaaaattagccaggcatggtggtggacacctgtagtcccagctactcgggaggctgaggcaggagaactgggtgaactcaggagg

SEQ ID NO: 437 - DNA, 2205 bp, Homo sapiens
ctgaagggacccccctcggagcccgcccacgcgagatgaggacggtggcccagcccccccatgccctccccctgggggccgcccccgctcccgccccgtgcgcttcctgggtggggccgggggcggcttcaaaaccccctgccgacccagccggtccccgccgccgccgcccttcgcgccctgggccatctccctcccacctccctccgcggagcagccagacagcgagggccccggccgggggcaggggggacgccccgtccggggcacccccccggctctgagccgcccgcggggccggcctcggcccggagcggaggaaggagtcgccgaggagcagcctgaggccccagagtctgagacgagccgccgccgcccccgccactgcggggaggagggggaggaggagcgggaggagggacgagctggtcgggagaagaggaaaaaaacttttgagacttttccgttgccgctgggagccggaggcgcggggacctcttggcgcgacgctgccccgcgaggaggcaggacttggggaccccagaccgcctccctttgccgccggggacgcttgctccctccctgccccctacacggcgtccctcaggcgcccccattccggaccagccctcgggagtcgccgacccggcctcccgcaaagacttttccccagacctcgggcgcaccccctgcacgccgccttcatccccggcctgtctcctgagcccccgcgcatcctagaccctttctcctccaggagacggatctctctccgacctgccacagatcccctattcaagaccacccaccttctggtaccagatcgcgcccatctaggttatttccgtgggatactgagacacccccggtccaagcctcccctccaccactgcgcccttctccctgaggacctcagctttccctcgaggccctcctaccttttgccgggagacccccagcccctgcaggggcggggcctccccaccacaccagccctgttcgcgctctcggcagtgccggggggcgccgcctcccccatgccgccctccgggctgcggctgctgctgctgctgctaccgctgctgtggctactggtgctgacgcctggccggccggccgcgggactatccacctgcaagactatcgacatggagctggtgaagcggaagcgcatcgaggccatccgcggccagatcctgtccaagctgcggctcgccagccccccgagccagggggaggtgccgcccggcccgctgcccgaggccgtgctcgccctgtacaacagcacccgcgaccgggtggccggggagagtgcagaaccggagcccgagcctgaggccgactactacgccaaggaggtcacccgcgtgctaatggtggaaacccacaacgaaatctatgacaagttcaagcagagtacacacagcatatatatgttcttcaacacatcagagctccgagaagcggtacctgaacccgtgttgctctcccgggcagagctgcgtctgctgaggctcaagttaaaagtggagcagcacgtggagctgtaccagaaatacagcaacaattcctggcgatacctcagcaaccggctgctggcacccagcgactcgccagagtggttatcttttgatgtcaccggagttgtgcggcagtggttgagccgtggaggggaaattgagggctttcgccttagcgcccactgctcctgtgacagcagggataacacactgcaagtggacatcaacgctccacggagaagaactgctgcgtgcggcagctgtacattgacttccgcaaggacctcggctggaagtggatccacgagcccaagggctaccatgccaacttctgcctcgggccctgcccctacatttggagcctggacacgcagtacagcaaggtcctggccctgtacaaccagcataacccgggcgcctcggcggcgccgtgctgcgtgccgcaggcgctggagccgctgcccatcgtgtactacgtgggccgcaagcccaaggtggagcagctgtccaacatgatcgtgcgctcctgcaagtgcagctgaggtcccgccccgccccgccccgccccggcaggcccggccccaccccgccccgcccccgctgccttgcccatgggggctgtatttaaggacacccgtgccccaagcccacctggggccccattaaagatggagagaggactgcg

SEQ ID NO: 438 - DNA, 2293 bp, Homo sapiens
ctgaagggacccccctcggagcccgcccacgcgagatgaggacggtggcccagcccccccatgccctccccctgggggccgcccccgctcccgccccgtgcgcttcctgggtggggccgggggcggcttcaaaaccccctgccgacccagccggtccccgccgccgccgcccttcgcgccctgggccatctccctcccacctccctccgcggagcagccagacagcgagggccccggccgggggcaggggggacgccccgtccggggcacccccccggctctgagccgcccgcggggccggcctcggcccggagcggaggaaggagtcgccgaggagcagcctgaggccccagagtctgagacgagccgccgccgcccccgccactgcggggaggagggggaggaggagcgggaggagggacgagctggtcgggagaagaggaaaaaaacttttgagacttttccgttgccgctgggagccggaggcgcggggacctcttggcgcgacgctgccccgcgaggaggcaggacttggggaccccagaccgcctccctttgccgccggggacgcttgctccctccctgccccctacacggcgtccctcaggcgcccccattccggaccagccctcgggagtcgccgacccggcctcccgcaaagacttttccccagacctcgggcgcaccccctgcacgccgccttcatccccggcctgtctcctgagcccccgcgcatcctagaccctttctcctccaggagacggatctctctccgacctgccacagatcccctattcaagaccacccaccttctggtaccagatcgcgcccatctaggttatttccgtgggatactgagacacccccggtccaagcctcccctccaccactgcgcccttctccctgaggacctcagctttccctcgaggccctcctaccttttgccgggagacccccagcccctgcaggggcggggcctccccaccacaccagccctgttcgcgctctcggcagtgccggggggcgccgcctcccccatgccgccctccgggctgcggctgctgctgctgctgctaccgctgctgtggctactggtgctgacgcctggccggccggccgcgggactatccacctgcaagactatcgacatggagctggtgaagcggaagcgcatcgaggccatccgcggccagatcctgtccaagctgcggctcgccagccccccgagccagggggaggtgccgcccggcccgctgcccgaggccgtgctcgccctgtacaacagcacccgcgaccgggtggccggggagagtgcagaaccggagcccgagcctgaggccgactactacgccaaggaggtcacccgcgtgctaatggtggaaacccacaacgaaatctatgacaagttcaagcagagtacacacagcatatatatgttcttcaacacatcagagctccgagaagcggtacctgaacccgtgttgctctcccgggcagagctgcgtctgctgaggctcaagttaaaagtggagcagcacgtggagctgtaccagaaatacagcaacaattcctggcgatacctcagcaaccggctgctggcacccagcgactcgccagagtggttatcttttgatgtcaccggagttgtgcggcagtggttgagccgtggaggggaaattgagggctttcgccttagcgcccactgctcctgtgacagcagggataacacactgcaagtggacatcaacgctccacggagaagaactgctgcgtgcggcagctgtacattgacttccgcaaggacctcggctggaagtggatccacgagcccaagggctaccatgccaacttctgcctcgggccctgcccctacatttggagcctggacacgcagtacagcaaggtacgtctggcccaccgggctacgagatgcgcttggggggagccaggacggaggaagaggagagagaaagagaagtaaagtcagagaggtcctggccctgtacaaccagcataacccgggcgcctcggcggcgccgtgctgcgtgccgcaggcgctggagccgctgcccatcgtgtactacgtgggccgcaagcccaaggtggagcagctgtccaacatgatcgtgcgctcctgcaagtgcagctgaggtcccgccccgccccgccccgccccggcaggcccggccccaccccgccccgcccccgctgccttgcccatgggggctgtatttaaggacacccgtgccccaagcccacctggggccccattaaagatggagagaggactgcg

SEQ ID NO: 439 - DNA, 334 bp, Artificial sequence
  Synthetic oligonucleotide
ctgaagggacccccctcggagcccgcccacgcgagatgaggacggtggcccagcccccccatgccctccccctgggggccgcccccgctcccgccccgtgcgcttcctgggtggggccgggggcggcttcaaaaccccctgccgacccagccggtccccgccgccgccgcccttcgcgccctgggccatctccctcccacctccctccgcggagcagccagacagcgagggccccggccgggggcaggggggacgccccgtccggggcacccccccggctctgagccgcccgcggggccggcctcggcccggagcggaggaaggagtcgccgag

SEQ ID NO: 440 - DNA, 247 bp, Artificial sequence
  Synthetic oligonucleotide
gagggacgagctggtcgggagaagaggaaaaaaacttttgagacttttccgttgccgctgggagccggaggcgcggggacctcttggcgcgacgctgccccgcgaggaggcaggacttggggaccccagaccgcctccctttgccgccggggacgcttgctccctccctgccccctacacggcgtccctcaggcgcccccattccggaccagccctcgggagtcgccgacccggcctcccgcaaaga

SEQ ID NO: 441 - DNA, 234 bp, Artificial sequence
  Synthetic oligonucleotide
cttttccccagacctcgggcgcaccccctgcacgccgccttcatccccggcctgtctcctgagcccccgcgcatcctagaccctttctcctccaggagacggatctctctccgacctgccacagatcccctattcaagaccacccaccttctggtaccagatcgcgcccatctaggttatttccgtgggatactgagacacccccggtccaagcctcccctccaccactgcgcc

SEQ ID NO: 442 - DNA, 213 bp, Artificial sequence
  Synthetic oligonucleotide
cttctccctgaggacctcagctttccctcgaggccctcctaccttttgccgggagacccccagcccctgcaggggcggggcctccccaccacaccagccctgttcgcgctctcggcagtgccggggggcgccgcctcccccatgccgccctccgggctgcggctgctgctgctgctgctaccgctgctgtggctactggtgctgacgcctggc

SEQ ID NO: 443 - DNA, 173 bp, Artificial sequence
  Synthetic oligonucleotide
ccccccgagccagggggaggtgccgcccggcccgctgcccgaggccgtgctcgccctgtacaacagcacccgcgaccgggtggccggggagagtgcagaaccggagcccgagcctgaggccgactactacgccaaggaggtcacccgcgtgctaatggtggaaacccacaacg

SEQ ID NO: 444 - DNA, 161 bp, Artificial sequence
  Synthetic oligonucleotide
aaatctatgacaagttcaagcagagtacacacagcatatatatgttcttcaacacatcagagctccgagaagcggtacctgaacccgtgttgctctcccgggcagagctgcgtctgctgaggctcaagttaaaagtggagcagcacgtggagctgtaccag

SEQ ID NO: 445 - DNA, 139 bp, Artificial sequence
  Synthetic oligonucleotide
gtgaggcctgcttccccggccatgcccagttgtgacgtgtgtgcgtgtgtgtgttcccatctgccccacgccccacttatctatccctctgagagtgtgtgtgtatgtcccctatcccctgactcccacaccaaagcag

SEQ ID NO: 446 - DNA, 154 bp, Artificial sequence
  Synthetic oligonucleotide
ctccacggagaagaactgctgcgtgcggcagctgtacattgacttccgcaaggacctcggctggaagtggatccacgagcccaagggctaccatgccaacttctgcctcgggccctgcccctacatttggagcctggacacgcagtacagcaag

SEQ ID NO: 447 - DNA, 132 bp, Artificial sequence
  Synthetic oligonucleotide
cggcgccgtgctgcgtgccgcaggcgctggagccgctgcccatcgtgtactacgtgggccgcaagcccaaggtggagcagctgtccaacatgatcgtgcgctcctgcaagtgcagctgaggtcccgccccgc

SEQ ID NO: 448 - DNA, 835 bp, Artificial sequence
  Synthetic oligonucleotide
cccgccccgcccccgctgccttgcccatgggggctgtatttaaggacacccgtgccccaagcccacctggggccccattaaagatggagagaggactgcggatctctgtgtcattgggcgcctgcctggggtctccatccctgacgttcccccactcccactccctctctctccctctctgcctcctcctgcctgtctgcactattcctttgcccggcatcaaggcacaggggaccagtggggaacactactgtagttagatctatttattgagcaccttgggcactgttgaagtgccttacattaatgaactcattcagtcaccatagcaacactctgagatggcagggactctgataacacccattttaaaggtgaggaaacaagcccagagaggttaagggaggagttcctgcccaccaggaacctgctttagtgggggatagtgaagaagacaataaaagatagtagttcaggccaggcggggtggctcacgcctgtaatcctagcacttttgggaggcagagatgggaggattacttgaatccaggcatttgagaccagcctgggtaacatagtgagaccctatctctacaaaacacttttaaaaaatgtacacctgtggtcccagctactctggaggctaaggtgggaggatcacttgatcctgggaggtcaaggctgcagtgagccctgactgtgccactgtatgccagcctgggtgacaaagcaagactccatcttttttttatgttttttttttgagacggattttcactcttgttgcccaggctggagtgcaatgtcgagatcttggctcaccacaacctctgcc

SEQ ID NO: 449 - DNA, 318 bp, Artificial sequence
  Synthetic oligonucleotide
gtcagtaccttctgaagtctggtcccctccacccagaagagtggccttccagaagggagaaggtgaagaaaactggaatagtgaataagaaagacatagacagaagggcgggcgcggtggctcacgcctgtaatcccagcactttgggaggccgaggcgggtggatcacctgaggtcaggagttcaagaccagcctggccaacatggcaaaaccccatctctactaaaaatacaaaaattagccaggcatggtggtggacacctgtagtcccagctactcgggaggctgaggcaggagaactgggtgaactcaggagg

SEQ ID NO: 450 - DNA, 169 bp, Artificial sequence
  Synthetic oligonucleotide
gaccctgcattgacgttcctctgggaagcactcatttcctacctttcatttctaagaccgcatgatctgggacatccttcccttcctcgtcggttcgctttattgttcggtcttttaggtcctcgtcagtgggacaaattacaatagctttgcgctggaagccttcaaa

SEQ ID NO: 451 - DNA, 81 bp, Artificial sequence
  Synthetic oligonucleotide
gagcagcctgaggccccagagtctgagacgagccgccgccgcccccgccactgcggggaggagggggaggaggagcgggag

SEQ ID NO: 452 - DNA, 110 bp, Artificial sequence
  Synthetic oligonucleotide
cggccggccgcgggactatccacctgcaagactatcgacatggagctggtgaagcggaagcgcatcgaggccatccgcggccagatcctgtccaagctgcggctcgccag

SEQ ID NO: 453 - DNA, 118 bp, Artificial sequence
  Synthetic oligonucleotide
aaatacagcaacaattcctggcgatacctcagcaaccggctgctggcacccagcgactcgccagagtggttatcttttgatgtcaccggagttgtgcggcagtggttgagccgtggag

SEQ ID NO: 454 - DNA, 78 bp, Artificial sequence
  Synthetic oligonucleotide
gggaaattgagggctttcgccttagcgcccactgctcctgtgacagcagggataacacactgcaagtggacatcaacg

SEQ ID NO: 455 - DNA, 59 bp, Artificial sequence
  Synthetic oligonucleotide
ggttcactaccggccgccgaggtgacctggccaccattcatggcatgaaccggcctttc

SEQ ID NO: 456 - DNA, 39 bp, Artificial sequence
  Synthetic oligonucleotide
ctgcttctcatggccaccccgctggagagggcccagcat

SEQ ID NO: 457 - DNA, 12 bp, Artificial sequence
  Synthetic oligonucleotide
ctgcaaagctcc

SEQ ID NO: 458 - DNA, 38 bp, Artificial sequence
  Synthetic oligonucleotide
cggcaccgccgagccctggacaccaactattgcttcag

SEQ ID NO: 459 - DNA, 88 bp, Artificial sequence
  Synthetic oligonucleotide
gtacgtctggcccaccgggctacgagatgcgcttggggggagccaggacggaggaagaggagagagaaagagaagtaaagtcagagag

SEQ ID NO: 460 - DNA, 40 bp, Artificial sequence
  Synthetic oligonucleotide
gtcctggccctgtacaaccagcataacccgggcgcctcgg

SEQ ID NO: 461 - DNA, 30 bp, Artificial sequence
  Synthetic oligonucleotide
cccgccccgccccggcaggcccggccccac

SEQ ID NO: 462 - DNA, 97 bp, Artificial sequence
  Synthetic oligonucleotide
ctcaatgaacagaacctcatccaggaagtccccaacatctggcaacgtgaagttggctaggaggaaggaagtgccccaaagagaacaagaagaagag

SEQ ID NO: 463 - protein, 390 aa, Homo sapiens
MPPSGLRLLLLLLPLLWLLVLTPGRPAAGLSTCKTIDMELVKRKRIEAIRGQILSKLRLASPPSQGEVPPGPLPEAVLALYNSTRDRVAGESAEPEPEPEADYYAKEVTRVLMVETHNEIYDKFKQSTHSIYMFFNTSELREAVPEPVLLSRAELRLLRLKLKVEQHVELYQKYSNNSWRYLSNRLLAPSDSPEWLSFDVTGVVRQWLSRGGEIEGFRLSAHCSCDSRDNTLQVDINGFTTGRRGDLATIHGMNRPFLLLMATPLERAQHLQSSRHRRALDTNYCFSSTEKNCCVRQLYIDFRKDLGWKWIHEPKGYHANFCLGPCPYIWSLDTQYSKVLALYNQHNPGASAAPCCVPQALEPLPIVYYVGRKPKVEQLSNMIVRSCKCS

SEQ ID NO: 464 - protein, 248 aa, Homo sapiens [sequence omitted]

SEQ ID NO: 465 - protein, 363 aa, Homo sapiens [sequence omitted]

SEQ ID NO: 466 - protein, 357 aa, Homo sapiens
MPPSGLRLLLLLLPLLWLLVLTPGRPAAGLSTCKTIDMELVKRKRIEAIRGQILSKLRLASPPSQGEVPPGPLPEAVLALYNSTRDRVAGESAEPEPEPEADYYAKEVTRVLMVETHNEIYDKFKQSTHSIYMFFNTSELREAVPEPVLLSRAELRLLRLKLKVEQHVELYQKYSNNSWRYLSNRLLAPSDSPEWLSFDVTGVVRQWLSRGGEIEGFRLSAHCSCDSRDNTLQVDINGFTTGRRGDLATIHGMNRPFLLLMATPLERAQHLQSSRHRRALDTNYCFSSTEKNCCVRQLYIDFRKDLGWKWIHEPKGYHANFCLGPCPYIWSLDTQYSKLNEQNLIQEVPNIWQREVG

SEQ ID NO: 467 - protein, 332 aa, Homo sapiens [sequence omitted]

SEQ ID NO: 468 - protein, 370 aa, Homo sapiens
MPPSGLRLLLLLLPLLWLLVLTPGRPAAGLSTCKTIDMELVKRKRIEAIRGQILSKLRLASPPSQGEVPPGPLPEAVLALYNSTRDRVAGESAEPEPEPEADYYAKEVTRVLMVETHNEIYDKFKQSTHSIYMFFNTSELREAVPEPVLLSRAELRLLRLKLKVEQHVELYQKYSNNSWRYLSNRLLAPSDSPEWLSFDVTGVVRQWLSRGGEIEGFRLSAHCSCDSRDNTLQVDINAPRRRTAACGSCTLTSARTSAGSGSTSPRATMPTSASGPAPTFGAWTRSTARYVWPTGLRDALGGSQDGGRGERKRSKVREVLALYNQHNPGASAAPCCVPQALEPLPIVYYVGRKPKVEQLSNMIVRSCKCS

SEQ ID NO: 469 - DNA, 19 bp, Artificial sequence
  Synthetic oligonucleotide
tgagggctttcgccttagc

SEQ ID NO: 470 - DNA, 20 bp, Artificial sequence
  Synthetic oligonucleotide
cacacgtcacaactgggcat

SEQ ID NO: 471 - DNA, 112 bp, Artificial sequence
  Synthetic oligonucleotide
tgagggctttcgccttagcgcccactgctcctgtgacagcagggataacacactgcaagtggacatcaacggtgaggcctgcttccccggccatgcccagttgtgacgtgtg

SEQ ID NO: 472 - DNA, 21 bp, Artificial sequence
  Synthetic oligonucleotide
caagtggacatcaacgctcca

SEQ ID NO: 473 - DNA, 19 bp, Artificial sequence
  Synthetic oligonucleotide
gggccagacgtaccttgct

SEQ ID NO: 474 - DNA, 183 bp, Artificial sequence
  Synthetic oligonucleotide
caagtggacatcaacgctccacggagaagaactgctgcgtgcggcagctgtacattgacttccgcaaggacctcggctggaagtggatccacgagcccaagggctaccatgccaacttctgcctcgggccctgcccctacatttggagcctggacacgcagtacagcaaggtacgtctggccc

SEQ ID NO: 475 - DNA, 19 bp, Artificial sequence
  Synthetic oligonucleotide
gctcgccctgtacaacagc

SEQ ID NO: 476 - DNA, 22 bp, Artificial sequence
  Synthetic oligonucleotide
gacctccttggcgtagtagtcg

SEQ ID NO: 477 - DNA, 94 bp, Artificial sequence
  Synthetic oligonucleotide
gctcgccctgtacaacagcacccgcgaccgggtggccggggagagtgcagaaccggagcccgagcctgaggccgactactacgccaaggaggtc

SEQ ID NO: 478 - DNA, 2637 bp, Homo sapiens
gaggaggtggaggaggagggctgcttgaggaagtataagaatgaagttgtgaagctgagattcccctccattgggaccggagaaaccaggggagccccccgggcagccgcgcgccccttcccacggggccctttactgcgccgcgcgcccggcccccacccctcgcagcaccccgcgccccgcgccctcccagccgggtccagccggagccatggggccggagccgcagtgagcaccatggagctggcggccttgtgccgctgggggctcctcctcgccctcttgccccccggagccgcgagcacccaagtgtgcaccggcacagacatgaagctgcggctccctgccagtcccgagacccacctggacatgctccgccacctctaccagggctgccaggtggtgcagggaaacctggaactcacctacctgcccaccaatgccagcctgtccttcctgcaggatatccaggaggtgcagggctacgtgctcatcgctcacaaccaagtgaggcaggtcccactgcagaggctgcggattgtgcgaggcacccagctctttgaggacaactatgccctggccgtgctagacaatggagacccgctgaacaataccacccctgtcacaggggcctccccaggaggcctgcgggagctgcagcttcgaagcctcacagagatcttgaaaggaggggtcttgatccagcggaacccccagctctgctaccaggacacgattttgtggaaggacatcttccacaagaacaaccagctggctctcacactgatagacaccaaccgctctcgggcctgccacccctgttctccgatgtgtaagggctcccgctgctggggagagagttctgaggattgtcagagcctgacgcgcactgtctgtgccggtggctgtgcccgctgcaaggggccactgcccactgactgctgccatgagcagtgtgctgccggctgcacgggccccaagcactctgactgcctggcctgcctccacttcaaccacagtggcatctgtgagctgcactgcccagccctggtcacctacaacacagacacgtttgagtccatgcccaatcccgagggccggtatacattcggcgccagctgtgtgactgcctgtccctacaactacctttctacggacgtgggatcctgcaccctcgtctgccccctgcacaaccaagaggtgacagcagaggatggaacacagcggtgtgagaagtgcagcaagccctgtgcccgagtgtgctatggtctgggcatggagcacttgcgagaggtgagggcagttaccagtgccaatatccaggagtttgctggctgcaagaagatctttgggagcctggcatttctgccggagagctttgatggggacccagcctccaacactgccccgctccagccagagcagctccaagtgtttgagactctggaagagatcacaggttacctatacatctcagcatggccggacagcctgcctgacctcagcgtcttccagaacctgcaagtaatccggggacgaattctgcacaatggcgcctactcgctgaccctgcaagggctgggcatcagctggctggggctgcgctcactgagggaactgggcagtggactggccctcatccaccataacacccacctctgcttcgtgcacacggtgccctgggaccagctctttcggaacccgcaccaagctctgctccacactgccaaccggccagaggacgagtgtgtgggcgagggcctggcctgccaccagctgtgcgcccgagggcactgctggggtccagggcccacccagtgtgtcaactgcagccagttccttcggggccaggagtgcgtggaggaatgccgagtactgcaggggctccccagggagtatgtgaatgccaggcactgtttgccgtgccaccctgagtgtcagccccagaatggctcagtgacctgttttggaccggaggctgaccagtgtgtggcctgtgcccactataaggaccctcccttctgcgtggcccgctgccccagcggtgtgaaacctgacctctcctacatgcccatctggaagtttccagatgaggagggcgcatgccagccttgccccatcaactgcacccactcctgtgtggacctggatgacaagggctgccccgccgagcagagagccaggttggcctggaccccaggatgtacccttcattgcccttcactcccccactggatgctgggtggtcactgctgtagggaggggaccccctgacatatgtcccttcccacccactcttccactgtggaacctcctgtcattttccacttcaccaagtgacagaggacctgctcagatgctgaggggaggggactgcaaggaaagatggctaggaaacccagtccctccacaccctagagtaacttgatgccttgtgagggacacaggcaaagttcaattccttggaagtcaagggagactgagaagagtacagctgcagcactgagggagtgatgaattcttaactggggatggtgggaggcttcgagtgggaggtggcatttgagctaggctttgagagaggagcaggtattgcacttgcatttaggtagaaagcattggggtgcaaggtgacac

SEQ ID NO: 479 - DNA, 2747 bp, Homo sapiens
gaggaggtggaggaggagggctgcttgaggaagtataagaatgaagttgtgaagctgagattcccctccattgggaccggagaaaccaggggagccccccgggcagccgcgcgccccttcccacggggccctttactgcgccgcgcgcccggcccccacccctcgcagcaccccgcgccccgcgccctcccagccgggtccagccggagccatggggccggagccgcagtgagcaccatggagctggcggccttgtgccgctgggggctcctcctcgccctcttgccccccggagccgcgagcacccaagtgtgcaccggcacagacatgaagctgcggctccctgccagtcccgagacccacctggacatgctccgccacctctaccagggctgccaggtggtgcagggaaacctggaactcacctacctgcccaccaatgccagcctgtccttcctgcaggatatccaggaggtgcagggctacgtgctcatcgctcacaaccaagtgaggcaggtcccactgcagaggctgcggattgtgcgaggcacccagctctttgaggacaactatgccctggccgtgctagacaatggagacccgctgaacaataccacccctgtcacaggggcctccccaggaggcctgcgggagctgcagcttcgaagcctcacagagatcttgaaaggaggggtcttgatccagcggaacccccagctctgctaccaggacacgattttgtggaaggacatcttccacaagaacaaccagctggctctcacactgatagacaccaaccgctctcgggcctgccacccctgttctccgatgtgtaagggctcccgctgctggggagagagttctgaggattgtcagagcctgacgcgcactgtctgtgccggtggctgtgcccgctgcaaggggccactgcccactgactgctgccatgagcagtgtgctgccggctgcacgggccccaagcactctgactgcctggcctgcctccacttcaaccacagtggcatctgtgagctgcactgcccagccctggtcacctacaacacagacacgtttgagtccatgcccaatcccgagggccggtatacattcggcgccagctgtgtgactgcctgtccctacaactacctttctacggacgtgggatcctgcaccctcgtctgccccctgcacaaccaagaggtgacagcagaggatggaacacagcggtgtgagaagtgcagcaagccctgtgcccgagtgtgctatggtctgggcatggagcacttgcgagaggtgagggcagttaccagtgccaatatccaggagtttgctggctgcaagaagatctttgggagcctggcatttctgccggagagctttgatggagtctcactctgtcagcaggctggagtgcagtggtacgatcttggctcactgcaacctctgcctcctggattcaagcaattctcctgcctcagtctcctgagtagctgggactacagggacccagcctccaacactgccccgctccagccagagcagctccaagtgtttgagactctggaagagatcacaggttacctatacatctcagcatggccggacagcctgcctgacctcagcgtcttccagaacctgcaagtaatccggggacgaattctgcacaatggcgcctactcgctgaccctgcaagggctgggcatcagctggctggggctgcgctcactgagggaactgggcagtggactggccctcatccaccataacacccacctctgcttcgtgcacacggtgccctgggaccagctctttcggaacccgcaccaagctctgctccacactgccaaccggccagaggacgagtgtgtgggcgagggcctggcctgccaccagctgtgcgcccgagggcactgctggggtccagggcccacccagtgtgtcaactgcagccagttccttcggggccaggagtgcgtggaggaatgccgagtactgcaggggctccccagggagtatgtgaatgccaggcactgtttgccgtgccaccctgagtgtcagccccagaatggctcagtgacctgttttggaccggaggctgaccagtgtgtggcctgtgcccactataaggaccctcccttctgcgtggcccgctgccccagcggtgtgaaacctgacctctcctacatgcccatctggaagtttccagatgaggagggcgcatgccagccttgccccatcaactgcacccactcctgtgtggacctggatgacaagggctgccccgccgagcagagagccaggttggcctggaccccaggatgtacccttcattgcccttcactcccccactggatgctgggtggtcactgctgtagggaggggaccccctgacatatgtcccttcccacccactcttccactgtggaacctcctgtcattttccacttcaccaagtgacagaggacctgctcagatgctgaggggaggggactgcaaggaaagatggctaggaaacccagtccctccacaccctagagtaacttgatgccttgtgagggacacaggcaaagttcaattccttggaagtcaagggagactgagaagagtacagctgcagcactgagggagtgatgaattcttaactggggatggtgggaggcttcgagtgggaggtggcatttgagctaggctttgagagaggagcaggtattgcacttgcatttaggtagaaagcattggggtgcaag

SEQ ID NO: 480 - DNA, 2031 bp, Homo sapiens
gaggaggtggaggaggagggctgcttgaggaagtataagaatgaagttgtgaagctgagattcccctccattgggaccggagaaaccaggggagccccccgggcagccgcgcgccccttcccacggggccctttactgcgccgcgcgcccggcccccacccctcgcagcaccccgcgccccgcgccctcccagccgggtccagccggagccatggggccggagccgcagtgagcaccatggagctggcggccttgtgccgctgggggctcctcctcgccctcttgccccccggagccgcgagcacccaagtgtgcaccggcacagacatgaagctgcggctccctgccagtcccgagacccacctggacatgctccgccacctctaccagggctgccaggtggtgcagggaaacctggaactcacctacctgcccaccaatgccagcctgtccttcctgcaggatatccaggaggtgcagggctacgtgctcatcgctcacaaccaagtgaggcaggtcccactgcagaggctgcggattgtgcgaggcacccagctctttgaggacaactatgccctggccgtgctagacaatggagacccgctgaacaataccacccctgtcacaggggcctccccaggaggcctgcgggagctgcagcttcgaagcctcacagagatcttgaaaggaggggtcttgatccagcggaacccccagctctgctaccaggacacgattttgtggaaggacatcttccacaagaacaaccagctggctctcacactgatagacaccaaccgctctcgggcctgccacccctgttctccgatgtgtaagggctcccgctgctggggagagagttctgaggattgtcagagcctgacgcgcactgtctgtgccggtggctgtgcccgctgcaaggggccactgcccactgactgctgccatgagcagtgtgctgccggctgcacgggccccaagcactctgactgcctggcctgcctccacttcaaccacagtggcatctgtgagctgcactgcccagccctggtcacctacaacacagacacgtttgagtccatgcccaatcccgagggccggtatacattcggcgccagctgtgtgactgcctgtccctacaactacctttctacggacgtgggatcctgcaccctcgtctgccccctgcacaaccaagaggtgacagcagaggatggaacacagcggtgtgagaagtgcagcaagccctgtgcccgagtgtgctatggtctgggcatggagcacttgcgagaggtgagggcagttaccagtgccaatatccaggagtttgctggctgcaagaagatctttgggagcctggcatttctgccggagagctttgatggggacccagcctccaacactgccccgctccagccagagcagctccaagtgtttgagactctggaagagatcacaggttacctatacatctcagcatggccggacagcctgcctgacctcagcgtcttccagaacctgcaagtaatccggggacgaattctgcacaatggcgcctactcgctgaccctgcaagggctgggcatcagctggctggggctgcgctcactgagggaactgggcagtggactggccctcatccaccataacacccacctctgcttcgtgcacacggtgccctgggaccagctctttcggaacccgcaccaagctctgctccacactgccaaccggccagaggacgagtgtggtaagacagggagcccagtgtgcgcactccccatctgccagcacacagcagtgcccagggggccctggcagcagcgttcttggacttgtgcagactgcccgtctctgtgcacccttcttgactcagcacagctctggctggcttggcctcttggcatggcttctctagctgggtcctacctgccttggcatccttccctccccctctgtttctgaaatctcagaactcttcctctccctacatcggccccacctgtccccacccctccagcccacagccat

SEQ ID NO: 481 - DNA, 4740 bp, Homo sapiens
gaggaggtggaggaggagggctgcttgaggaagtataagaatgaagttgtgaagctgagattcccctccattgggaccggagaaaccaggggagccccccgggcagccgcgcgccccttcccacggggccctttactgcgccgcgcgcccggcccccacccctcgcagcaccccgcgccccgcgccctcccagccgggtccagccggagccatggggccggagccgcagtgagcaccatggagctggcggccttgtgccgctgggggctcctcctcgccctcttgccccccggagccgcgagcacccaagtgtgcaccggcacagacatgaagctgcggctccctgccagtcccgagacccacctggacatgctccgccacctctaccagggctgccaggtggtgcagggaaacctggaactcacctacctgcccaccaatgccagcctgtccttcctgcaggatatccaggaggtgcagggctacgtgctcatcgctcacaaccaagtgaggcaggtcccactgcagaggctgcggattgtgcgaggcacccagctctttgaggacaactatgccctggccgtgctagacaatggagacccgctgaacaataccacccctgtcacaggggcctccccaggaggcctgcgggagctgcagcttcgaagcctcacagagatcttgaaaggaggggtcttgatccagcggaacccccagctctgctaccaggacacgattttgtggaaggacatcttccacaagaacaaccagctggctctcacactgatagacaccaaccgctctcgggcctgccacccctgttctccgatgtgtaagggctcccgctgctggggagagagttctgaggattgtcagagcctgacgcgcactgtctgtgccggtggctgtgcccgctgcaaggggccactgcccactgactgctgccatgagcagtgtgctgccggctgcacgggccccaagcactctgactgcctggcctgcctccacttcaaccacagtggcatctgtgagctgcactgcccagccctggtcacctacaacacagacacgtttgagtccatgcccaatcccgagggccggtatacattcggcgccagctgtgtgactgcctgtccctacaactacctttctacggacgtgggatcctgcaccctcgtctgccccctgcacaaccaagaggtgacagcagaggatggaacacagcggtgtgagaagtgcagcaagccctgtgcccgagtgtgctatggtctgggcatggagcacttgcgagaggtgagggcagttaccagtgccaatatccaggagtttgctggctgcaagaagatctttgggagcctggcatttctgccggagagctttgatggagtctcactctgtcagcaggctggagtgcagtggtacgatcttggctcactgcaacctctgcctcctggattcaagcaattctcctgcctcagtctcctgagtagctgggactacagggacccagcctccaacactgccccgctccagccagagcagctccaagtgtttgagactctggaagagatcacaggttacctatacatctcagcatggccggacagcctgcctgacctcagcgtcttccagaacctgcaagtaatccggggacgaattctgcacaatggcgcctactcgctgaccctgcaagggctgggcatcagctggctggggctgcgctcactgagggaactgggcagtggactggccctcatccaccataacacccacctctgcttcgtgcacacggtgccctgggaccagctctttcggaacccgcaccaagctctgctccacactgccaaccggccagaggacgagtgtgtgggcgagggcctggcctgccaccagctgtgcgcccgagggcactgctggggtccagggcccacccagtgtgtcaactgcagccagttccttcggggccaggagtgcgtggaggaatgccgagtactgcaggggctccccagggagtatgtgaatgccaggcactgtttgccgtgccaccctgagtgtcagccccagaatggctcagtgacctgttttggaccggaggctgaccagtgtgtggcctgtgcccactataaggaccctcccttctgcgtggcccgctgccccagcggtgtgaaacctgacctctcctacatgcccatctggaagtttccagatgaggagggcgcatgccagccttgccccatcaactgcacccactcctgtgtggacctggatgacaagggctgccccgccgagcagagagccagccctctgacgtccatcatctctgcggtggttggcattctgctggtcgtggtcttgggggtggtctttgggatcctcatcaagcgacggcagcagaagatccggaagtacacgatgcggagactgctgcaggaaacggagctggtggagccgctgacacctagcggagcgatgcccaaccaggcgcagatgcggatcctgaaagagacggagctgaggaaggtgaaggtgcttggatctggcgcttttggcacagtctacaagggcatctggatccctgatggggagaatgtgaaaattccagtggccatcaaagtgttgagggaaaacacatcccccaaagccaacaaagaaatcttagacgaagcatacgtgatggctggtgtgggctccccatatgtctcccgccttctgggcatctgcctgacatccacggtgcagctggtgacacagcttatgccctatggctgcctcttagaccatgtccgggaaaaccgcggacgcctgggctcccaggacctgctgaactggtgtatgcagattgccaaggggatgagctacctggaggatgtgcggctcgtacacagggacttggccgctcggaacgtgctggtcaagagtcccaaccatgtcaaaattacagacttcgggctggctcggctgctggacattgacgagacagagtaccatgcagatgggggcaaggtgcccatcaagtggatggcgctggagtccattctccgccggcggttcacccaccagagtgatgtgtggagttatggtgtgactgtgtgggagctgatgacttttggggccaaaccttacgatgggatcccagcccgggagatccctgacctgctggaaaagggggagcggctgccccagccccccatctgcaccattgatgtctacatgatcatggtcaaatgttggatgattgactctgaatgtcggccaagattccgggagttggtgtctgaattctcccgcatggccagggacccccagcgctttgtggtcatccagaatgaggacttgggcccagccagtcccttggacagcaccttctaccgctcactgctggaggacgatgacatgggggacctggtggatgctgaggagtatctggtaccccagcagggcttcttctgtccagaccctgccccgggcgctgggggcatggtccaccacaggcaccgcagctcatctaccaggagtggcggtggggacctgacactagggctggagccctctgaagaggaggcccccaggtctccactggcaccctccgaaggggctggctccgatgtatttgatggtgacctgggaatgggggcagccaaggggctgcaaagcctccccacacatgaccccagccctctacagcggtacagtgaggaccccacagtacccctgccctctgagactgatggctacgttgcccccctgacctgcagcccccagcctgaatatgtgaaccagccagatgttcggccccagcccccttcgccccgagagggccctctgcctgctgcccgacctgctggtgccactctggaaaggcccaagactctctccccagggaagaatggggtcgtcaaagacgtttttgcctttgggggtgccgtggagaaccccgagtacttgacaccccagggaggagctgcccctcagccccaccctcctcctgccttcagcccagccttcgacaacctctattactgggaccaggacccaccagagcggggggctccacccagcaccttcaaagggacacctacggcagagaacccagagtacctgggtctggacgtgccagtgtgaaccagaaggccaagtccgcagaagccctgatgtgtcctcagggagcagggaaggcctgacttctgctggcatcaagaggtgggagggccctccgaccacttccaggggaacctgccatgccaggaacctgtcctaaggaaccttccttcctgcttgagttcccagatggctggaaggggtccagcctcgttggaagaggaacagcactggggagtctttgtggattctgaggccctgcccaatgagactctagggtccagtggatgccacagcccagcttggccctttccttccagatcctgggtactgaaagccttagggaagctggcctgagaggggaagcggccctaagggagtgtctaagaacaaaagcgacccattcagagactgtccctgaaacctagtactgccccccatgaggaaggaacagcaatggtgtcagtatccaggctttgtacagagtgcttttctgtttagtttttactttttttgttttgtttttttaaagatgaaataaagacccagggggagaatgggtgttgtatggggaggcaagtgtggggggtccttctccacacccactttgtccatttgcaaatatattttggaaaacagcta

SEQ ID NO: 482 - DNA, 2148 bp, Homo sapiens
gaggaggtggaggaggagggctgcttgaggaagtataagaatgaagttgtgaagctgagattcccctccattgggaccggagaaaccaggggagccccccgggcagccgcgcgccccttcccacggggccctttactgcgccgcgcgcccggcccccacccctcgcagcaccccgcgccccgcgccctcccagccgggtccagccggagccatggggccggagccgcagtgagcaccatggagctggcggccttgtgccgctgggggctcctcctcgccctcttgccccccggagccgcgagcacccaagtgtgcaccggcacagacatgaagctgcggctccctgccagtcccgagacccacctggacatgctccgccacctctaccagggctgccaggtggtgcagggaaacctggaactcacctacctgcccaccaatgccagcctgtccttcctgcaggatatccaggaggtgcagggctacgtgctcatcgctcacaaccaagtgaggcaggtcccactgcagaggctgcggattgtgcgaggcacccagctctttgaggacaactatgccctggccgtgctagacaatggagacccgctgaacaataccacccctgtcacaggggcctccccaggaggcctgcgggagctgcagcttcgaagcctcacagagatcttgaaaggaggggtcttgatccagcggaacccccagctctgctaccaggacacgattttgtggaaggacatcttccacaagaacaaccagctggctctcacactgatagacaccaaccgctctcgggcctgccacccctgttctccgatgtgtaagggctcccgctgctggggagagagttctgaggattgtcagagcctgacgcgcactgtctgtgccggtggctgtgcccgctgcaaggggccactgcccactgactgctgccatgagcagtgtgctgccggctgcacgggccccaagcactctgactgcctggcctgcctccacttcaaccacagtggcatctgtgagctgcactgcccagccctggtcacctacaacacagacacgtttgagtccatgcccaatcccgagggccggtatacattcggcgccagctgtgtgactgcctgtccctacaactacctttctacggacgtgggatcctgcaccctcgtctgccccctgcacaaccaagaggtgacagcagaggatggaacacagcggtgtgagaagtgcagcaagccctgtgcccgagtgtgctatggtctgggcatggagcacttgcgagaggtgagggcagttaccagtgccaatatccaggagtttgctggctgcaagaagatctttgggagcctggcatttctgccggagagctttgatggagtctcactctgtcagcaggctggagtgcagtggtacgatcttggctcactgcaacctctgcctcctggattcaagcaattctcctgcctcagtctcctgagtagctgggactacagggacccagcctccaacactgccccgctccagccagagcagctccaagtgtttgagactctggaagagatcacaggttacctatacatctcagcatggccggacagcctgcctgacctcagcgtcttccagaacctgcaagtaatccggggacgaattctgcacaatggcgcctactcgctgaccctgcaagggctgggcatcagctggctggggctgcgctcactgagggaactgggcagtggactggccctcatccaccataacacccacctctgcttcgtgcacacggtgccctgggaccagctctttcggaacccgcaccaagctctgctccacactgccaaccggccagaggacgagtgtggtaagacagggagcccagtgtgcgcactccccatctgccagcacacagcagtgcccagggggccctggcagcagcgttcttggacttgtgcagactgcccgtctctgtgcacccttcttgactcagcacagctctggctggcttggcctcttggcatggcttctctagctgggtcctacctgccttggcatccttccctccccctctgtttctgaaatctcagaactcttcctctccctacatcggccccacctgtccccacccctccagcccacagccat

SEQ ID NO: 483 - DNA, 1407 bp, Homo sapiens
gaggaggtggaggaggagggctgcttgaggaagtataagaatgaagttgtgaagctgagattcccctccattgggaccggagaaaccaggggagccccccgggcagccgcgcgccccttcccacggggccctttactgcgccgcgcgcccggcccccacccctcgcagcaccccgcgccccgcgccctcccagccgggtccagccggagccatggggccggagccgcagtgagcaccatggagctggcggccttgtgccgctgggggctcctcctcgccctcttgccccccggagccgcgagcacccaagtgtgcaccggcacagacatgaagctgcggctccctgccagtcccgagacccacctggacatgctccgccacctctaccagggctgccaggtggtgcagggaaacctggaactcacctacctgcccaccaatgccagcctgtccttcctgcaggatatccaggaggtgcagggctacgtgctcatcgctcacaaccaagtgaggcaggtcccactgcagaggctgcggattgtgcgaggcacccagctctttgaggacaactatgccctggccgtgctagacaatggagacccgctgaacaataccacccctgtcacaggggcctccccaggaggcctgcgggagctgcagcttcgaagcctcacagagatcttgaaaggaggggtcttgatccagcggaacccccagctctgctaccaggacacgattttgtggaaggacatcttccacaagaacaaccagctggctctcacactgatagacaccaaccgctctcgggcctgccacccctgttctccgatgtgtaagggctcccgctgctggggagagagttctgaggattgtcagagcctgacgcgcactgtctgtgccggtggctgtgcccgctgcaaggggccactgcccactgactgctgccatgagcagtgtgctgccggctgcacgggccccaagcactctgactgcctggcctgcctccacttcaaccacagtggcatctgtgagctgcactgcccagccctggtcacctacaacacagacacgtttgagtccatgcccaatcccgagggccggtatacattcggcgccagctgtgtgactgcctgtccctacaactacctttctacggacgtgggatcctgcaccctcgtctgccccctgcacaaccaagaggtgacagcagaggatggaacacagcggtgtgagaagtgcagcaagccctgtgcccgagggacccagcctccaacactgccccgctccagccagagcagctccaagtgtttgagactctggaagagatcacaggttacctatacatctcagcatggccggacagcctgcctgacctcagcgtcttccagaacctgcaagtaatccggg

SEQ ID NO: 484 - DNA, 363 bp, Homo sapiens
tgcagttggagggggcgagctgggagcgcgcttgctcccaatcacaggagaaggaggaggtggaggaggagggctgcttgaggaagtataagaatgaagttgtgaagctgagattcccctccattgggaccggagaaaccaggggagccccccgggcagccgcgcgccccttcccacggggccctttactgcgccgcgcgcccggcccccacccctcgcagcaccccgcgccccgcgccctcccagccgggtccagccggagccatggggccggagccgcagtgagcaccatggagctggcggccttgtgccgctgggggctcctcctcgccctcttgccccccggagccgcgagcacccaag

SEQ ID NO: 485 - DNA, 152 bp, Homo sapiens
tgtgcaccggcacagacatgaagctgcggctccctgccagtcccgagacccacctggacatgctccgccacctctaccagggctgccaggtggtgcagggaaacctggaactcacctacctgcccaccaatgccagcctgtccttcctgcag

SEQ ID NO: 486 - DNA, 214 bp, Homo sapiens
gatatccaggaggtgcagggctacgtgctcatcgctcacaaccaagtgaggcaggtcccactgcagaggctgcggattgtgcgaggcacccagctctttgaggacaactatgccctggccgtgctagacaatggagacccgctgaacaataccacccctgtcacaggggcctccccaggaggcctgcgggagctgcagcttcgaagcctcacag

SEQ ID NO: 487 - DNA, 135 bp, Homo sapiens
agatcttgaaaggaggggtcttgatccagcggaacccccagctctgctaccaggacacgattttgtggaaggacatcttccacaagaacaaccagctggctctcacactgatagacaccaaccgctctcgggcct

SEQ ID NO: 488 - DNA, 142 bp, Homo sapiens
gcctgcctccacttcaaccacagtggcatctgtgagctgcactgcccagccctggtcacctacaacacagacacgtttgagtccatgcccaatcccgagggccggtatacattcggcgccagctgtgtgactgcctgtccct

SEQ ID NO: 489 - DNA, 120 bp, Homo sapiens
acaactacctttctacggacgtgggatcctgcaccctcgtctgccccctgcacaaccaagaggtgacagcagaggatggaacacagcggtgtgagaagtgcagcaagccctgtgcccgag

SEQ ID NO: 490 - DNA, 127 bp, Homo sapiens
tgtgctatggtctgggcatggagcacttgcgagaggtgagggcagttaccagtgccaatatccaggagtttgctggctgcaagaagatctttgggagcctggcatttctgccggagagctttgatgg

SEQ ID NO: 491 - DNA, 200 bp, Homo sapiens
tggcgcctactcgctgaccctgcaagggctgggcatcagctggctggggctgcgctcactgagggaactgggcagtggactggccctcatccaccataacacccacctctgcttcgtgcacacggtgccctgggaccagctctttcggaacccgcaccaagctctgctccacactgccaaccggccagaggacgagtgtg

SEQ ID NO: 492 - DNA, 361 bp, Homo sapiens
gtaagacagggagcccagtgtgcgcactccccatctgccagcacacagcagtgcccagggggccctggcagcagcgttcttggacttgtgcagactgcccgtctctgtgcacccttcttgactcagcacagctctggctggcttggcctcttggcatggcttctctagctgggtcctacctgccttggcatccttccctccccctctgtttctgaaatctcagaactcttcctctccctacatcggccccacctgtccccacccctccagcccacagccatgcccacagccagttccctggttcacttggacctggggcctcccctaaaagtcccctgcggtcccttcctcctcactgcag

SEQ ID NO: 493 - DNA, 133 bp, Homo sapiens
tgggcgagggcctggcctgccaccagctgtgcgcccgagggcactgctggggtccagggcccacccagtgtgtcaactgcagccagttccttcggggccaggagtgcgtggaggaatgccgagtactgcaggg

SEQ ID NO: 494 - DNA, 161 bp, Homo sapiens
gaggctgaccagtgtgtggcctgtgcccactataaggaccctcccttctgcgtggcccgctgccccagcggtgtgaaacctgacctctcctacatgcccatctggaagtttccagatgaggagggcgcatgccagccttgccccatcaactgcacccactc

SEQ ID NO: 495 - DNA, 1195 bp, Homo sapiens
gttggcctggaccccaggatgtacccttcattgcccttcactcccccactggatgctgggtggtcactgctgtagggaggggaccccctgacatatgtcccttcccacccactcttccactgtggaacctcctgtcattttccacttcaccaagtgacagaggacctgctcagatgctgaggggaggggactgcaaggaaagatggctaggaaacccagtccctccacaccctagagtaacttgatgccttgtgagggacacaggcaaagttcaattccttggaagtcaagggagactgagaagagtacagctgcagcactgagggagtgatgaattcttaactggggatggtgggaggcttcgagtgggaggtggcatttgagctaggctttgagagaggagcaggtattgcacttgcatttaggtagaaagcattggggtgcaaggtgacactggagggggaggcatcaggaaatccaggatgtcttcaaagttctggtgtcgggggctgttgagtaagcacaggaataagggggtcaagttagagtcagggtggggtctgacctggatgccataggacctgatccccaagccacagggtgggacttgactgggcagtggggacctttggaaaggactttggggagaaaaacagactggagtctgtcttaggcgatcatcggtccgtgaaatgagcatgtgttacaggcttggtatgtaccagaccctgtgctaagcaagggggtatggagaggagagggtgacaagaatattggatcaacacccgggagctccatctatcccaggatgcactatcttttttttatttttttgagacggagtctcactctgcctgcaggctggagtgcagtggctccatctcggttcactgcaacctctgcctcctgggttcaagcgcttcttgtgcctcagcctcccaagtagctgggattacaggcacatgccaccacacccagctaatttttgtatttttagtagagacggggtttcaccatgttggccaggatggtctcgatctcttgacctcaagatccgcccaccttggcctcccaaagtgctgggattacagacatgagccaccgtgcccagccagatacgctatctttttattgagtgattgagacagggtcttgctctcttgtccagtcttgaatgtggtggtgtaatcacagg

SEQ ID NO: 496 - DNA, 139 bp, Homo sapiens
ccctctgacgtccatcatctctgcggtggttggcattctgctggtcgtggtcttgggggtggtctttgggatcctcatcaagcgacggcagcagaagatccggaagtacacgatgcggagactgctgcaggaaacggag

SEQ ID NO: 497 - DNA, 186 bp, Homo sapiens
gaagcatacgtgatggctggtgtgggctccccatatgtctcccgccttctgggcatctgcctgacatccacggtgcagctggtgacacagcttatgccctatggctgcctcttagaccatgtccgggaaaaccgcggacgcctgggctcccaggacctgctgaactggtgtatgcagattgccaag

SEQ ID NO: 498 - DNA, 156 bp, Homo sapiens
gggatgagctacctggaggatgtgcggctcgtacacagggacttggccgctcggaacgtgctggtcaagagtcccaaccatgtcaaaattacagacttcgggctggctcggctgctggacattgacgagacagagtaccatgcagatgggggcaag

SEQ ID NO: 499 - DNA, 133 bp, Homo sapiens
aatgaggacttgggcccagccagtcccttggacagcaccttctaccgctcactgctggaggacgatgacatgggggacctggtggatgctgaggagtatctggtaccccagcagggcttcttctgtccagacc

SEQ ID NO: 500 - DNA, 151 bp, Homo sapiens
agtggcggtggggacctgacactagggctggagccctctgaagaggaggcccccaggtctccactggcaccctccgaaggggctggctccgatgtatttgatggtgacctgggaatgggggcagccaaggggctgcaaagcctccccacac

SEQ ID NO: 501 - DNA, 137 bp, Homo sapiens
ctggaaaggcccaagactctctccccagggaagaatggggtcgtcaaagacgtttttgcctttgggggtgccgtggagaaccccgagtacttgacaccccagggaggagctgcccctcagccccaccctcctcctgc

SEQ ID NO: 502 - DNA, 153 bp, Homo sapiens
ctttccttccagatcctgggtactgaaagccttagggaagctggcctgagaggggaagcggccctaagggagtgtctaagaacaaaagcgacccattcagagactgtccctgaaacctagtactgccccccatgaggaaggaacagcaatggt

SEQ ID NO: 503 - DNA, 648 bp, Homo sapiens
gtcagtatccaggctttgtacagagtgcttttctgtttagtttttactttttttgttttgtttttttaaagatgaaataaagacccagggggagaatgggtgttgtatggggaggcaagtgtggggggtccttctccacacccactttgtccatttgcaaatatattttggaaaacagctaggcaccggcctatgtctgggggtggctctgtgccatcccttcctgctcaccttacactcaattcctcttttcctggagggagtggctgggaatcttcagaaagcttggatgaggagccagacatccagttctccagcttcagggttgggggagatcgggaagctggattcagatctgagagccctttgacgaccagatcattcttatttagaacgaactaattcctaaggccactcaccagaatggggttatttcctccttgtgagtgaggagagtggtgggtagggtgggggaaagacgaggcagggtctactgtgggactcattttccttgccttggctatgccagaggagctcactgacctaaggagtagctgtccagaaagcccacccagccagcacagccaccctggcggtgcaaaggctgggctgaccggacttctgtgccccccacattcccagactgga

SEQ ID NO: 504 - DNA, 69 bp, Homo sapiens
gccacccctgttctccgatgtgtaagggctcccgctgctggggagagagttctgaggattgtcagagcc

SEQ ID NO: 505 - DNA, 116 bp, Homo sapiens
tgacgcgcactgtctgtgccggtggctgtgcccgctgcaaggggccactgcccactgactgctgccatgagcagtgtgctgccggctgcacgggccccaagcactctgactgcctg

SEQ ID NO: 506 - DNA, 117 bp, Homo sapiens
agtctcactctgtcagcaggctggagtgcagtggtacgatcttggctcactgcaacctctgcctcctggattcaagcaattctcctgcctcagtctcctgagtagctgggactacag

SEQ ID NO: 507 - DNA, 74 bp, Homo sapiens
ggacccagcctccaacactgccccgctccagccagagcagctccaagtgtttgagactctggaagagatcacag

SEQ ID NO: 508 - DNA, 91 bp, Homo sapiens
gttacctatacatctcagcatggccggacagcctgcctgacctcagcgtcttccagaacctgcaagtaatccggggacgaattctgcacaa

SEQ ID NO: 509 - DNA, 91 bp, Homo sapiens
gctccccagggagtatgtgaatgccaggcactgtttgccgtgccaccctgagtgtcagccccagaatggctcagtgacctgttttggaccg

SEQ ID NO: 510 - DNA, 48 bp, Homo sapiens
ctgtgtggacctggatgacaagggctgccccgccgagcagagagccag

SEQ ID NO: 511 - DNA, 81 bp, Homo sapiens
ctggtggagccgctgacacctagcggagcgatgcccaaccaggcgcagatgcggatcctgaaagagacggagctgaggaag

SEQ ID NO: 512 - DNA, 6 bp, Homo sapiens
gtgaag

SEQ ID NO: 513 - DNA, 36 bp, Homo sapiens
gtgcttggatctggcgcttttggcacagtctacaag

SEQ ID NO: 514 - DNA, 99 bp, Homo sapiens
ggcatctggatccctgatggggagaatgtgaaaattccagtggccatcaaagtgttgagggaaaacacatcccccaaagccaacaaagaaatcttagac

SEQ ID NO: 515 - DNA, 76 bp, Homo sapiens
gtgcccatcaagtggatggcgctggagtccattctccgccggcggttcacccaccagagtgatgtgtggagttatg

SEQ ID NO: 516 - DNA, 74 bp, Homo sapiens
gtgtgactgtgtgggagctgatgacttttggggccaaaccttacgatgggatcccagcccgggagatccctgac

SEQ ID NO: 517 - DNA, 73 bp, Homo sapiens
ctgctggaaaagggggagcggctgccccagccccccatctgcaccattgatgtctacatgatcatggtcaaat

SEQ ID NO: 518 - DNA, 98 bp, Homo sapiens
gttggatgattgactctgaatgtcggccaagattccgggagttggtgtctgaattctcccgcatggccagggacccccagcgctttgtggtcatccag

SEQ ID NO: 519 - DNA, 56 bp, Homo sapiens
ctgccccgggcgctgggggcatggtccaccacaggcaccgcagctcatctaccagg

SEQ ID NO: 520 - DNA, 52 bp, Homo sapiens
atgaccccagccctctacagcggtacagtgaggaccccacagtacccctgcc

SEQ ID NO: 521 - DNA, 33 bp, Homo sapiens
ctctgagactgatggctacgttgcccccctgac

SEQ ID NO: 522 - DNA, 14 bp, Homo sapiens
ctgcagcccccagc

SEQ ID NO: 523 - DNA, 3 bp, Homo sapiens
ctg

SEQ ID NO: 524 - DNA, 54 bp, Homo sapiens
aatatgtgaaccagccagatgttcggccccagcccccttcgccccgagagggcc

SEQ ID NO: 525 - DNA, 32 bp, Homo sapiens
ctctgcctgctgcccgacctgctggtgccact

SEQ ID NO: 526 - DNA, 72 bp, Homo sapiens
cttcagcccagccttcgacaacctctattactgggaccaggacccaccagagcggggggctccacccagcac

SEQ ID NO: 527 - DNA, 70 bp, Homo sapiens
cttcaaagggacacctacggcagagaacccagagtacctgggtctggacgtgccagtgtgaaccagaagg

SEQ ID NO: 528 - DNA, 15 bp, Homo sapiens
ccaagtccgcagaag

SEQ ID NO: 529 - DNA, 2 bp, Homo sapiens
cc

SEQ ID NO: 530 - DNA, 52 bp, Homo sapiens
ctgatgtgtcctcagggagcagggaaggcctgacttctgctggcatcaagag

SEQ ID NO: 531 - DNA, 11 bp, Homo sapiens
gtgggagggcc

SEQ ID NO: 532 - DNA, 76 bp, Homo sapiens
ctccgaccacttccaggggaacctgccatgccaggaacctgtcctaaggaaccttccttcctgcttgagttcccag

SEQ ID NO: 533 - DNA, 119 bp, Homo sapiens
atggctggaaggggtccagcctcgttggaagaggaacagcactggggagtctttgtggattctgaggccctgcccaatgagactctagggtccagtggatgccacagcccagcttggcc

SEQ ID NO: 534 - protein, 419 aa, Homo sapiens
MELAALCRWGLLLALLPPGAASTQVCTGTDMKLRLPASPETHLDMLRHLYQGCQVVQGNLELTYLPTNASLSFLQDIQEVQGYVLIAHNQVRQVPLQRLRIVRGTQLFEDNYALAVLDNGDPLNNTTPVTGASPGGLRELQLRSLTEILKGGVLIQRNPQLCYQDTILWKDIFHKNNQLALTLIDTNRSRACHPCSPMCKGSRCWGESSEDCQSLTRTVCAGGCARCKGPLPTDCCHEQCAAGCTGPKHSDCLACLHFNHSGICELHCPALVTYNTDTFESMPNPEGRYTFGASCVTACPYNYLSTDVGSCTLVCPLHNQEVTAEDGTQRCEKCSKPCARGTHSLPPRPAAVPVPLRMQPGPAHPVLSFLRPSWDLVSAFYSLPLAPLSPTSVPISPVSVGRGPDPDAHVAVDLSRYEG

SEQ ID NO: 535 - protein, 36 aa, Homo sapiens
KYTMRRLLQETELVEPLTPSGAMPNQAQMRILKETE

SEQ ID NO: 536 - protein, 435 aa, Homo sapiens
MPTASSLVHLDLGPPLKVPCGPFLLTAVGEGLACHQLCARGHCWGPGPTQCVNCSQFLRGQECVEECRVLQGYEGRRRGWLEGCMGLLSDPLTTVPSLRLPREYVNARHCLPCHPECQPQNGSVTCFGPEADQCVACAHYKDPPFCVARCPSGVKPDLSYMPIWKFPDEEGACQPCPINCTHSCVDLDDKGCPAEQRANPLTSIVSAVVGILLVVVLGVVFGILIKRRQQKIRKYTMRRLLQETELVEPLTPSGAMPNQAQMRILKETELRKVKVLGSGAFGTVYKGIWIPDGENVKIPVAIKVLRENTSPKANKEILDEAYVMAGVGSPYVSRLLGICLTSTVQLVTQLMPYGCLLDHVRENRGRLGSQDLLNWCMQIAKGMSYLEDVRLVHRDLAARNVLVKSPNHVKITDFGLARLLDIDETEYHADGGKVR

SEQ ID NO: 537 - protein, 165 aa, Homo sapiens
AGSDVFDGDLGMGAAKGLQSLPTHDPSPLQRYSEDPTVPLPSETDGYVAPLTCSPQPEYVNQPDVRPQPPSPREGPLPAARPAGATLERAKTLSPGKNGVVKDVFAFGGAVENPEYLTPQGGAAPQPHPPPAFSPAFDNLYYWDQDPPERGAPPSTFKGTPTAEN

SEQ ID NO: 538 - protein, 1255 aa, Homo sapiens [sequence omitted]

SEQ ID NO: 539 - protein, 1225 aa, Homo sapiens
MKLRLPASPETHLDMLRHLYQGCQVVQGNLELTYLPTNASLSFLQDIQEVQGYVLIAHNQVRQVPLQRLRIVRGTQLFEDNYALAVLDNGDPLNNTTPVTGASPGGLRELQLRSLTEILKGGVLIQRNPQLCYQDTILWKDIFHKNNQLALTLIDTNRSRACHPCSPMCKGSRCWGESSEDCQSLTRTVCAGGCARCKGPLPTDCCHEQCAAGCTGPKHSDCLACLHFNHSGICELHCPALVTYNTDTFESMPNPEGRYTFGASCVTACPYNYLSTDVGSCTLVCPLHNQEVTAEDGTQRCEKCSKPCARVCYGLGMEHLREVRAVTSANIQEFAGCKKIFGSLAFLPESFDGDPASNTAPLQPEQLQVFETLEEITGYLYISAWPDSLPDLSVFQNLQVIRGRILHNGAYSLTLQGLGISWLGLRSLRELGSGLALIHHNTHLCFVHTVPWDQLFRNPHQALLHTANRPEDECVGEGLACHQLCARGHCWGPGPTQCVNCSQFLRGQECVEECRVLQGLPREYVNARHCLPCHPECQPQNGSVTCFGPEADQCVACAHYKDPPFCVARCPSGVKPDLSYMPIWKFPDEEGACQPCPINCTHSCVDLDDKGCPAEQRASPLTSIISAVVGILLVVVLGVVFGILIKRRQQKIRKYTMRRLLQETELVEPLTPSGAMPNQAQMRILKETELRKVKVLGSGAFGTVYKGIWIPDGENVKIPVAIKVLRENTSPKANKEILDEAYVMAGVGSPYVSRLLGICLTSTVQLVTQLMPYGCLLDHVRENRGRLGSQDLLNWCMQIAKGMSYLEDVRLVHRDLAARNVLVKSPNHVKITDFGLARLLDIDETEYHADGGKVPIKWMALESILRRRFTHQSDVWSYGVTVWELMTFGAKPYDGIPAREIPDLLEKGERLPQPPICTIDVYMIMVKCWMIDSECRPRFRELVSEFSRMARDPQRFVVIQNEDLGPASPLDSTFYRSLLEDDDMGDLVDAEEYLVPQQGFFCPDPAPGAGGMVHHRHRSSSTRSGGGDLTLGLEPSEEEAPRSPLAPSEGAGSDVFDGDLGMGAAKGLQSLPTHDPSPLQRYSEDPTVPLPSETDGYVAPLTCSPQPEYVNQPDVRPQPPSPREGPLPAARPAGATLERPKTLSPGKNGVVKDVFAFGGAVENPEYLTPQGGAAPQPHPPPAFSPAFDNLYYWDQDPPERGAPPSTFKGTPTAENPEYLGLDVPV

SEQ ID NO: 540 - protein, 1255 aa, Homo sapiens [sequence omitted]

SEQ ID NO: 541 - protein, 412 aa, Homo sapiens
MALESILRRRFTHQSDVWSYGVTVWELMTFGAKPYDGIPAREIPDLLEKGERLPQPPICTIDVYMIMVKCWMIDSECRPRFRELVSEFSRMARDPQRFVVIQNEDLGPASPLDSTFYRSLLEDDDMGDLVDAEEYLVPQQGFFCPDPAPGAGGMVHHRHRSSSTRSGGGDLTLGLEPSEEEAPRSPLAPSEGAGSDVFDGDLGMGAAKGLQSLPTHDPSPLQRYSEDPTVPLPSETDGYVAPLTCSPQPEYVNQPDVRPQPPSPREGPLPAARPAGATLERPKTLSPGKNGVVKDVFAFGGAVENPEYLTPQGGAALSPTLLLPSAQPSTTSITGTRTHQSGGLHPAPSKGHLRQRTQSTWVWTCQCEPEGQVRRSPDVSSGSREGLTSAGIKRWEGPPTTSRGTCHARNLS

SEQ ID NO: 542 - protein, 1294 aa, Homo sapiens
MELAALCRWGLLLALLPPGAASTQVCTGTDMKLRLPASPETHLDMLRHLYQGCQVVQGNLELTYLPTNASLSFLQDIQEVQGYVLIAHNQVRQVPLQRLRIVRGTQLFEDNYALAVLDNGDPLNNTTPVTGASPGGLRELQLRSLTEILKGGVLIQRNPQLCYQDTILWKDIFHKNNQLALTLIDTNRSRACHPCSPMCKGSRCWGESSEDCQSLTRTVCAGGCARCKGPLPTDCCHEQCAAGCTGPKHSDCLACLHFNHSGICELHCPALVTYNTDTFESMPNPEGRYTFGASCVTACPYNYLSTDVGSCTLVCPLHNQEVTAEDGTQRCEKCSKPCARVCYGLGMEHLREVRAVTSANIQEFAGCKKIFGSLAFLPESFDGVSLCQQAGVQWYDLGSLQPLPPGFKQFSCLSLLSSWDYRDPASNTAPLQPEQLQVFETLEEITGYLYISAWPDSLPDLSVFQNLQVIRGRILHNGAYSLTLQGLGISWLGLRSLRELGSGLALIHHNTHLCFVHTVPWDQLFRNPHQALLHTANRPEDECVGEGLACHQLCARGHCWGPGPTQCVNCSQFLRGQECVEECRVLQGLPREYVNARHCLPCHPECQPQNGSVTCFGPEADQCVACAHYKDPPFCVARCPSGVKPDLSYMPIWKFPDEEGACQPCPINCTHSCVDLDDKGCPAEQRASPLTSIISAVVGILLVVVLGVVFGILIKRRQQKIRKYTMRRLLQETELVEPLTPSGAMPNQAQMRILKETELRKVKVLGSGAFGTVYKGIWIPDGENVKIPVAIKVLRENTSPKANKEILDEAYVMAGVGSPYVSRLLGICLTSTVQLVTQLMPYGCLLDHVRENRGRLGSQDLLNWCMQIAKGMSYLEDVRLVHRDLAARNVLVKSPNHVKITDFGLARLLDIDETEYHADGGKVPIKWMALESILRRRFTHQSDVWSYGVTVWELMTFGAKPYDGIPAREIPDLLEKGERLPQPPICTIDVYMIMVKCWMIDSECRPRFRELVSEFSRMARDPQRFVVIQNEDLGPASPLDSTFYRSLLEDDDMGDLVDAEEYLVPQQGFFCPDPAPGAGGMVHHRHRSSSTRSGGGDLTLGLEPSEEEAPRSPLAPSEGAGSDVFDGDLGMGAAKGLQSLPTHDPSPLQRYSEDPTVPLPSETDGYVAPLTCSPQPEYVNQPDVRPQPPSPREGPLPAARPAGATLERPKTLSPGKNGVVKDVFAFGGAVENPEYLTPQGGAAPQPHPPPAFSPAFDNLYYWDQDPPERGAPPSTFKGTPTAENPEYLGLDVPV

SEQ ID NO: 543 - protein, 575 aa, Homo sapiens
MELAALCRWGLLLALLPPGAASTQVCTGTDMKLRLPASPETHLDMLRHLYQGCQVVQGNLELTYLPTNASLSFLQDIQEVQGYVLIAHNQVRQVPLQRLRIVRGTQLFEDNYALAVLDNGDPLNNTTPVTGASPGGLRELQLRSLTEILKGGVLIQRNPQLCYQDTILWKDIFHKNNQLALTLIDTNRSRACHPCSPMCKGSRCWGESSEDCQSLTRTVCAGGCARCKGPLPTDCCHEQCAAGCTGPKHSDCLACLHFNHSGICELHCPALVTYNTDTFESMPNPEGRYTFGASCVTACPYNYLSTDVGSCTLVCPLHNQEVTAEDGTQRCEKCSKPCARVCYGLGMEHLREVRAVTSANIQEFAGCKKIFGSLAFLPESFDGDPASNTAPLQPEQLQVFETLEEITGYLYISAWPDSLPDLSVFQNLQVIRGRILHNGAYSLTLQGLGISWLGLRSLRELGSGLALIHHNTHLCFVHTVPWDQLFRNPHQALLHTANRPEDECGKTGSPVCALPICQHTAVPRGPWQQRSWTCADCPSLCTLLDSAQLWLAWPLGMASLAGSYLPWHPSLPLCF

SEQ ID NO: 544 - protein, 614 aa, Homo sapiens
MELAALCRWGLLLALLPPGAASTQVCTGTDMKLRLPASPETHLDMLRHLYQGCQVVQGNLELTYLPTNASLSFLQDIQEVQGYVLIAHNQVRQVPLQRLRIVRGTQLFEDNYALAVLDNGDPLNNTTPVTGASPGGLRELQLRSLTEILKGGVLIQRNPQLCYQDTILWKDIFHKNNQLALTLIDTNRSRACHPCSPMCKGSRCWGESSEDCQSLTRTVCAGGCARCKGPLPTDCCHEQCAAGCTGPKHSDCLACLHFNHSGICELHCPALVTYNTDTFESMPNPEGRYTFGASCVTACPYNYLSTDVGSCTLVCPLHNQEVTAEDGTQRCEKCSKPCARVCYGLGMEHLREVRAVTSANIQEFAGCKKIFGSLAFLPESFDGVSLCQQAGVQWYDLGSLQPLPPGFKQFSCLSLLSSWDYRDPASNTAPLQPEQLQVFETLEEITGYLYISAWPDSLPDLSVFQNLQVIRGRILHNGAYSLTLQGLGISWLGLRSLRELGSGLALIHHNTHLCFVHTVPWDQLFRNPHQALLHTANRPEDECGKTGSPVCALPICQHTAVPRGPWQQRSWTCADCPSLCTLLDSAQLWLAWPLGMASLAGSYLPWHPSLPLCF

SEQ ID NO: 545 - protein, 387 aa, Homo sapiens
MELAALCRWGLLLALLPPGAASTQVCTGTDMKLRLPASPETHLDMLRHLYQGCQVVQGNLELTYLPTNASLSFLQDIQEVQGYVLIAHNQVRQVPLQRLRIVRGTQLFEDNYALAVLDNGDPLNNTTPVTGASPGGLRELQLRSLTEILKGGVLIQRNPQLCYQDTILWKDIFHKNNQLALTLIDTNRSRACHPCSPMCKGSRCWGESSEDCQSLTRTVCAGGCARCKGPLPTDCCHEQCAAGCTGPKHSDCLACLHFNHSGICELHCPALVTYNTDTFESMPNPEGRYTFGASCVTACPYNYLSTDVGSCTLVCPLHNQEVTAEDGTQRCEKCSKPCARGTQPPTLPRSSQSSSKCLRLWKRSQVTYTSQHGRTACLTSASSRTCK

SEQ ID NO: 546 - protein, 678 aa, Homo sapiens
MELAALCRWGLLLALLPPGAASTQVCTGTDMKLRLPASPETHLDMLRHLYQGCQVVQGNLELTYLPTNASLSFLQDIQEVQGYVLIAHNQVRQVPLQRLRIVRGTQLFEDNYALAVLDNGDPLNNTTPVTGASPGGLRELQLRSLTEILKGGVLIQRNPQLCYQDTILWKDIFHKNNQLALTLIDTNRSRACHPCSPMCKGSRCWGESSEDCQSLTRTVCAGGCARCKGPLPTDCCHEQCAAGCTGPKHSDCLACLHFNHSGICELHCPALVTYNTDTFESMPNPEGRYTFGASCVTACPYNYLSTDVGSCTLVCPLHNQEVTAEDGTQRCEKCSKPCARVCYGLGMEHLREVRAVTSANIQEFAGCKKIFGSLAFLPESFDGDPASNTAPLQPEQLQVFETLEEITGYLYISAWPDSLPDLSVFQNLQVIRGRILHNGAYSLTLQGLGISWLGLRSLRELGSGLALIHHNTHLCFVHTVPWDQLFRNPHQALLHTANRPEDECVGEGLACHQLCARGHCWGPGPTQCVNCSQFLRGQECVEECRVLQGLPREYVNARHCLPCHPECQPQNGSVTCFGPEADQCVACAHYKDPPFCVARCPSGVKPDLSYMPIWKFPDEEGACQPCPINCTHSCVDLDDKGCPAEQRARLAWTPGCTLHCPSLPHWMLGGHCCREGTP

SEQ ID NO: 547 - protein, 717 aa, Homo sapiens
MELAALCRWGLLLALLPPGAASTQVCTGTDMKLRLPASPETHLDMLRHLYQGCQVVQGNLELTYLPTNASLSFLQDIQEVQGYVLIAHNQVRQVPLQRLRIVRGTQLFEDNYALAVLDNGDPLNNTTPVTGASPGGLRELQLRSLTEILKGGVLIQRNPQLCYQDTILWKDIFHKNNQLALTLIDTNRSRACHPCSPMCKGSRCWGESSEDCQSLTRTVCAGGCARCKGPLPTDCCHEQCAAGCTGPKHSDCLACLHFNHSGICELHCPALVTYNTDTFESMPNPEGRYTFGASCVTACPYNYLSTDVGSCTLVCPLHNQEVTAEDGTQRCEKCSKPCARVCYGLGMEHLREVRAVTSANIQEFAGCKKIFGSLAFLPESFDGVSLCQQAGVQWYDLGSLQPLPPGFKQFSCLSLLSSWDYRDPASNTAPLQPEQLQVFETLEEITGYLYISAWPDSLPDLSVFQNLQVIRGRILHNGAYSLTLQGLGISWLGLRSLRELGSGLALIHHNTHLCFVHTVPWDQLFRNPHQALLHTANRPEDECVGEGLACHQLCARGHCWGPGPTQCVNCSQFLRGQECVEECRVLQGLPREYVNARHCLPCHPECQPQNGSVTCFGPEADQCVACAHYKDPPFCVARCPSGVKPDLSYMPIWKFPDEEGACQPCPINCTHSCVDLDDKGCPAEQRARLAWTPGCTLHCPSLPHWMLGGHCCREGTP

SEQ ID NO: 548 - DNA, 16 bp, Artificial sequence
  Synthetic oligonucleotide
gacaagggctgccccg

SEQ ID NO: 549 - DNA, 19 bp, Artificial sequence
  Synthetic oligonucleotide
cagtgaccacccagcatcc

SEQ ID NO: 550 - DNA, 101 bp, Artificial sequence
  Synthetic oligonucleotide
gacaagggctgccccgccgagcagagagccaggttggcctggaccccaggatgtacccttcattgcccttcactcccccactggatgctgggtggtcactg

SEQ ID NO: 551 - protein, 59 aa, Artificial sequence
  Synthetic peptide
CAGCGTTCTTGGACTTGTGCREVERSEPRIMERSSSEGRCCAGCTAGAGAAGCCATGCC

SEQ ID NO: 552 - DNA, 101 bp, Artificial sequence
  Synthetic oligonucleotide
cagcgttcttggacttgtgcagactgcccgtctctgtgcacccttcttgactcagcacagctctggctggcttggcctcttggcatggcttctctagctgg

SEQ ID NO: 553 - DNA, 19 bp, Artificial sequence
  Synthetic oligonucleotide
cccatatgtctcccgcctt

SEQ ID NO: 554 - DNA, 21 bp, Artificial sequence
  Synthetic oligonucleotide
acatggtctaagaggcagcca

SEQ ID NO: 555 - DNA, 19 bp, Artificial sequence
  Synthetic oligonucleotide
cccatatgtctcccgcctt

SEQ ID NO: 556 - DNA, 21 bp, Artificial sequence
  Synthetic oligonucleotide
acatggtctaagaggcagcca

SEQ ID NO: 557 - DNA, 93 bp, Artificial sequence
  Synthetic oligonucleotide
cccatatgtctcccgccttctgggcatctgcctgacatccacggtgcagctggtgacacagcttatgccctatggctgcctcttagaccatgt

SEQ ID NO: 558 - DNA, 20 bp, Homo sapiens
tctgctggccactgtgactg

SEQ ID NO: 559 - DNA, 21 bp, Homo sapiens
gaagaaaaagagctcgcctcg

SEQ ID NO: 560 - DNA, 136 bp, Artificial sequence; identical to SEQ ID NO: 381
  Synthetic oligonucleotide

SEQ ID NO: 561 - DNA, 30 bp, Artificial sequence
  Synthetic oligonucleotide
tacaaaattagtagaaatcagcattcttgc

SEQ ID NO: 562 - DNA, 32 bp, Artificial sequence
  Synthetic oligonucleotide
tgtagaactaacaagagctgatattattggat

SEQ ID NO: 563 - DNA, 118 bp, Artificial sequence
  Synthetic oligonucleotide
tacaaaattagtagaaatcagcattcttgcttttatttttaaatgctagttcaagtactattctttttaaagagaagtcatttctaatccaataatatcagctcttgttagttctaca

SEQ ID NO: 564 - DNA, 2064 bp, Homo sapiens
acatattcagcagggttagcttgtcctcccctccctcttcagcttcccagacactgagtctggaatgaaaattcacctgcctctgagttggctcctaatgggggtgggagtgttacttcggttcccaggttggaagattatctcacccggccccagctatataagctgaccggtgtggaggggcccagcagggccaactccagggattccttccacgacagaaaaacatacaagactccttcagccaacatgatggtactgaaagtagaggaactggtcactggaaagaagaatggcaatggggaggcaggggaattccttcctgaggatttcagagatggagagtatgaagctgctgttactttagagaagcaggaggatctgaagacacttctagcccaccctgtgaccctgggggagcaacagtggaaaagcgagaaacaacgagaggcagagctcaaaaagaaaaaactagaacaaagatcaaagcttgaaaatttagaagaccttgaaataatcattcaactgaagaaaaggaaaaaatacaggaaaactaaagttccagttgtaaaggaaccagaacctgaaatcatttataaacggacagctcttcatagagcatgcttggaaggacatttggcaattgtggagaagttaatggaagctggagcccagatcgaattccgtgatatgcttgaatccacagccatccactgggcaagccgtggaggaaacctggatgttttaaaattgttgctgaataaaggagcaaaaattagcgcccgagataagttgctcagcacagcgctgcatgtggcggtgaggactggccactatgagtgcgcggagcatcttatcgcctgtgaggcagacctcaacgccaaagacagagaaggagataccccgttgcatgatgcggtgagactgaaccgctataagatgatccgactcctgattatgtatggcgcggatctcaacatcaagaactgtgctgggaagacgccgatggatctggtgctacactggcagaatggaaccaaagcaatattcgacagcctcagagagaactcctacaagacctctcgcatagctacattctgaggcaaacgacagactcttaatcagtaaatgttcactggcattttgaaggcatggcccaagagaagagacactagccataaaatctagtttctatttatcaacgtgttgtgaagatgtacctaatgaagttttgagaaagcacagggttataggtgtttaaatttcctttagtgaaactcttatttatttttatgtattcctgtttatttatttactgccacgctactgatattcagaccttcatgatcatccatctggtgagcagagcttcatttgtatataacactttcagagccttcccacccataggtagttcttaaaccaggtgaaagagcaaagttcaagtgcctacttatgtgtcattcgctcatgtaagagtttttaagagagggctgattatcacagccctcttttctcctgaatttttaatgcagaagtttgaatgaagcaagggaaggcatgtagggacaggaaaggaaacaatggaaggaaagtgattctgtgaaaaggacagtgaagccagctattttacccccaggctggattttttttttttttttttttttttttttttaccgagtacacagagtacccaagtgaagagaacgtcatgagtgtaagtgcaaatcagtggaaggagcggcaaactgggacatgcagaattgaatttgctcaaaaaagatgaaaggaaatgcaaactgtaaatgtataaatgtatattgtattgtatgtacattttatattcataataaaggcaatcaaactctaaacctctaagtccttctataagtgtggtggaaatgtcctatgtgaaaaaaaaagctatataggagggttttttttttccattgttttccaagttttgcagattagaaatgtcccgtacaacagcactcccagtatttaatatgtatacagatcacctggggatctggttaaaatgcagatttctgattcagctgg

SEQ ID NO: 565 - DNA, 1472 bp, Homo sapiens
acatattcagcagggttagcttgtcctcccctccctcttcagcttcccagacactgagtctggaatgaaaattcacctgcctctgagttggctcctaatgggggtgggagtgttacttcggttcccaggttggaagattatctcacccggccccagctatataagctgaccggtgtggaggggcccagcagggccaactccagggattccttccacgacagaaaaacatacaagactccttcagccaacatgatggtactgaaagtagaggaactggtcactggaaagaagaatggcaatggggaggcaggggaattccttcctgaggatttcagagatggagagtatgaagctgctgttactttagagaagcaggaggatctgaagacacttctagcccaccctgtgaccctgggggagcaacagtggaaaagcgagaaacaacgagaggcagagctcaaaaagaaaaaactagaacaaagatcaaagcttgaaaatttagaagaccttgaaataatcattcaactgaagaaaaggaaaaaatacaggaaaactaaagttccagttgtaaaggaaccagaacctgaaatcattacggaacctgtggatgtgcctacgtttctgaaggctgctctggagaataaactgccagtagtagaaaaattcttgtcagacaagaacaatccagatgtttgtgatgagtataaacggacagctcttcatagagcatgcttggaaggacatttggcaattgtggagaagttaatggaagctggagcccagatcgaattccgtgatatggtaaatatatttctttgcttgggaatgagccaaaagaagtagactatatgaagctccggaaaacctccaatgcaaaaccgagctgattggattgaaaattgatctgagagaactaggcaaaagctcatttctccaaataaaggaaagttgggagatgagagtaggtcatgtgaaaatattttccatacatactgaaaatagaggaatatttcagggaaaagaaggaagtgaaagctgttaaactgaattcaatatcctcatcagcgagttagtcattcattttcgacacttgcctttcaacagccttgtccctccattgttcacagggcagcctgcttatggttggctgccagcaacatatacgaattctctagctgcacactttatatgatagatgccaattgctaccaatgagatttggggctagactgcatatgaaatgaattgcatctatggaaagtagctgctattcagacctcaataattcaatcactgtgatttctacgaagaccagtatgcagcataatttatgaactgaagattgagctgggaaaattctttatgtatttaaatgcagctcattttgactttatagcaaagcggcaacgggatatcaaagaaatccaagggacttggccaaaattgaatccaaaacataaacacattgaaaa

SEQ ID NO: 566 - DNA, 1387 bp, Homo sapiens
acatattcagcagggttagcttgtcctcccctccctcttcagcttcccagacactgagtctggaatgaaaattcacctgcctctgagttggctcctaatgggggtgggagtgttacttcggttcccaggttggaagattatctcacccggccccagctatataagctgaccggtgtggaggggcccagcagggccaactccagggattccttccacgacagaaaaacatacaagactccttcagccaacatgatggtactgaaagtagaggaactggtcactggaaagaagaatggcaatggggaggcaggggaattccttcctgaggatttcagagatggagagtatgaagctgctgttactttagagaagcaggaggatctgaagacacttctagcccaccctgtgaccctgggggagcaacagtggaaaagcgagaaacaacgagaggcagagctcaaaaagaaaaaactagaacaaagatcaaagcttgaaaatttagaagaccttgaaataatcattcaactgaagaaaaggaaaaaatacaggaaaactaaagttccagttgtaaaggaaccagaacctgaaatcattacggaacctgtggatgtgcctacgtttctgaaggctgctctggagaataaactgccagtagtagaaaaattcttgtcagacaagaacaatccagatgtttgtgatgaggtaagactcatgcaaagcactgcaaaatccagctcattaattttatgtttcttatgctttactccagtcttgctaatatagtgccaaagtccttccacctgaaacagtttccccagctgttgctgtgtatgccaggagcctaataggagagttcagtggtccaaaaaataaatagatattagatcagtgatacggattgcattgttttttgcactcatatacatctggctgatttttcagtttttctttaacttcttagattcttgggataagacttttaatgtgggccaaaaagtcacctttagagatatattattagcatcatctttgattaaaaccaagcacgtcaacactagataagaaatctggagattggagttcaggggccagttgtaccactacttggctatttggttttgagcagctaatttgcatcctctgggctgtggtttccttatctgtaaacatggggcattggagtgaaataacgcctaaagttgttccagctctaatagttcattagcccattcaaataaagccaatttatcagaaatcactaatctttttgtattctttcccccatgaagtgaaattggggaccgcttctgaagttgaactaaaaacatgtctcccattctcctaaaaatgaatggaaactttttgatagtctagcaacagtcccaga

SEQ ID NO: 567 - DNA, 1877 bp, Homo sapiens
acatattcagcagggttagcttgtcctcccctccctcttcagcttcccagacactgagtctggaatgaaaattcacctgcctctgagttggctcctaatgggggtgggagtgttacttcggttcccaggttggaagattatctcacccggccccagctatataagctgaccggtgtggaggggcccagcagggccaactccagggattccttccacgacagaaaaacatacaagactccttcagccaacatgatggtactgaaagtagaggaactggtcactggaaagaagaatggcaatggggaggcaggggaattccttcctgaggatttcagagatggagagtatgaagctgctgttactttagagaagcaggaggatctgaagacacttctagcccaccctgtgaccctgggggagcaacagtggaaaagcgagaaacaacgagaggcagagctcaaaaagaaaaaactagaacaaagatcaaagcttgaaaatttagaagaccttgaaataatcattcaactgaagaaaaggaaaaaatacaggaaaactaaagttccagttgtaaaggaaccagaacctgaaatcattacggaacctgtggatgtgcctacgtttctgaaggctgctctggagaataaactgccagtagtagaaaaattcttgtcagacaagaacaatccagatgtttgtgatgagcttgaatccacagccatccactgggcaagccgtggaggaaacctggatgttttaaaattgttgctgaataaaggagcaaaaattagcgcccgagataagttgctcagcacagcgctgcatgtggcggtgaggactggccactatgagtgcgcggagcatcttatcgcctgtgaggcagacctcaacgccaaagacagagaaggagataccccgttgcatgatgcggtgagactgaaccgctataagatgatccgactcctgattatgtatggcgcggatctcaacatcaagaactgtgctgggaagacgccgatggatctggtgctacactggcagaatggaaccaaagcaatattcgacagcctcagagagaactcctacaagacctctcgcatagctacattctgaggcaaacgacagactcttaatcagtaaatgttcactggcattttgaaggcatggcccaagagaagagacactagccataaaatctagtttctatttatcaacgtgttgtgaagatgtacctaatgaagttttgagaaagcacagggttataggtgtttaaatttcctttagtgaaactcttatttatttttatgtattcctgtttatttatttactgccacgctactgatattcagaccttcatgatcatccatctggtgagcagagcttcatttgtatataacactttcagagccttcccacccataggtagttcttaaaccaggtgaaagagcaaagttcaagtgcctacttatgtgtcattcgctcatgtaagagtttttaagagagggctgattatcacagccctcttttctcctgaatttttaatgcagaagtttgaatgaagcaagggaaggcatgtagggacaggaaaggaaacaatggaaggaaagtgattctgtgaaaaggacagtgaagccagctattttacccccaggctggattttttttttttttttttttttttttttttaccgagtacacagagtacccaagtgaagagaacgtcatgagtgtaagtgcaaatcagtggaaggagcggcaaactgggacatgcagaattgaatttgctcaaaaaagatgaaaggaaatgcaaactgtaaatgtataaatgtatattgtattgtatgtacattttatattcataataaaggcaatcaaactct

SEQ ID NO: 568 - DNA, 276 bp, Artificial sequence
  Synthetic oligonucleotide
acatattcagcagggttagcttgtcctcccctccctcttcagcttcccagacactgagtctggaatgaaaattcacctgcctctgagttggctcctaatgggggtgggagtgttacttcggttcccaggttggaagattatctcacccggccccagctatataagctgaccggtgtggaggggcccagcagggccaactccagggattccttccacgacagaaaaacatacaagactccttcagccaacatgatggtactgaaagtagaggaactg

SEQ ID NO: 569 - DNA, 180 bp, Artificial sequence
  Synthetic oligonucleotide
gtcactggaaagaagaatggcaatggggaggcaggggaattccttcctgaggatttcagagatggagagtatgaagctgctgttactttagagaagcaggaggatctgaagacacttctagcccaccctgtgaccctgggggagcaacagtggaaaagcgagaaacaacgagaggcagag

SEQ ID NO: 570 - DNA, 138 bp, Artificial sequence
  Synthetic oligonucleotide
ctcaaaaagaaaaaactagaacaaagatcaaagcttgaaaatttagaagaccttgaaataatcattcaactgaagaaaaggaaaaaatacaggaaaactaaagttccagttgtaaaggaaccagaacctgaaatcatt

SEQ ID NO: 571 - DNA, 685 bp, Artificial sequence
  Synthetic oligonucleotide
gtaagactcatgcaaagcactgcaaaatccagctcattaattttatgtttcttatgctttactccagtcttgctaatatagtgccaaagtccttccacctgaaacagtttccccagctgttgctgtgtatgccaggagcctaataggagagttcagtggtccaaaaaataaatagatattagatcagtgatacggattgcattgttttttgcactcatatacatctggctgatttttcagtttttctttaacttcttagattcttgggataagacttttaatgtgggccaaaaagtcacctttagagatatattattagcatcatctttgattaaaaccaagcacgtcaacactagataagaaatctggagattggagttcaggggccagttgtaccactacttggctatttggttttgagcagctaatttgcatcctctgggctgtggtttccttatctgtaaacatggggcattggagtgaaataacgcctaaagttgttccagctctaatagttcattagcccattcaaataaagccaatttatcagaaatcactaatctttttgtattctttcccccatgaagtgaaattggggaccgcttctgaagttgaactaaaaacatgtctcccattctcctaaaaatgaatggaaactttttgatagtctagcaacagtcccaga

SEQ ID NO: 572 - DNA, 671 bp, Artificial sequence
  Synthetic oligonucleotide
gtaaatatatttctttgcttgggaatgagccaaaagaagtagactatatgaagctccggaaaacctccaatgcaaaaccgagctgattggattgaaaattgatctgagagaactaggcaaaagctcatttctccaaataaaggaaagttgggagatgagagtaggtcatgtgaaaatattttccatacatactgaaaatagaggaatatttcagggaaaagaaggaagtgaaagctgttaaactgaattcaatatcctcatcagcgagttagtcattcattttcgacacttgcctttcaacagccttgtccctccattgttcacagggcagcctgcttatggttggctgccagcaacatatacgaattctctagctgcacactttatatgatagatgccaattgctaccaatgagatttggggctagactgcatatgaaatgaattgcatctatggaaagtagctgctattcagacctcaataattcaatcactgtgatttctacgaagaccagtatgcagcataatttatgaactgaagattgagctgggaaaattctttatgtatttaaatgcagctcattttgactttatagcaaagcggcaacgggatatcaaagaaatccaagggacttggccaaaattgaatccaaaacataaacacattgaaaa

SEQ ID NO: 573 - DNA, 1074 bp, Artificial sequence
  Synthetic oligonucleotide
gctgggaagacgccgatggatctggtgctacactggcagaatggaaccaaagcaatattcgacagcctcagagagaactcctacaagacctctcgcatagctacattctgaggcaaacgacagactcttaatcagtaaatgttcactggcattttgaaggcatggcccaagagaagagacactagccataaaatctagtttctatttatcaacgtgttgtgaagatgtacctaatgaagttttgagaaagcacagggttataggtgtttaaatttcctttagtgaaactcttatttatttttatgtattcctgtttatttatttactgccacgctactgatattcagaccttcatgatcatccatctggtgagcagagcttcatttgtatataacactttcagagccttcccacccataggtagttcttaaaccaggtgaaagagcaaagttcaagtgcctacttatgtgtcattcgctcatgtaagagtttttaagagagggctgattatcacagccctcttttctcctgaatttttaatgcagaagtttgaatgaagcaagggaaggcatgtagggacaggaaaggaaacaatggaaggaaagtgattctgtgaaaaggacagtgaagccagctattttacccccaggctggattttttttttttttttttttttttttttttaccgagtacacagagtacccaagtgaagagaacgtcatgagtgtaagtgcaaatcagtggaaggagcggcaaactgggacatgcagaattgaatttgctcaaaaaagatgaaaggaaatgcaaactgtaaatgtataaatgtatattgtattgtatgtacattttatattcataataaaggcaatcaaactctaaacctctaagtccttctataagtgtggtggaaatgtcctatgtgaaaaaaaaagctatataggagggttttttttttccattgttttccaagttttgcagattagaaatgtcccgtacaacagcactcccagtatttaatatgtatacagatcacctggggatctggttaaaatgcagatttctgattcagctgg

SEQ ID NO: 574 - DNA, 108 bp, Artificial sequence
  Synthetic oligonucleotide
acggaacctgtggatgtgcctacgtttctgaaggctgctctggagaataaactgccagtagtagaaaaattcttgtcagacaagaacaatccagatgtttgtgatgag

SEQ ID NO: 575 - DNA, 99 bp, Artificial sequence
  Synthetic oligonucleotide
tataaacggacagctcttcatagagcatgcttggaaggacatttggcaattgtggagaagttaatggaagctggagcccagatcgaattccgtgatatg

SEQ ID NO: 576 - DNA, 99 bp, Artificial sequence
  Synthetic oligonucleotide
cttgaatccacagccatccactgggcaagccgtggaggaaacctggatgttttaaaattgttgctgaataaaggagcaaaaattagcgcccgagataag

SEQ ID NO: 577 - DNA, 99 bp, Artificial sequence
  Synthetic oligonucleotide
ttgctcagcacagcgctgcatgtggcggtgaggactggccactatgagtgcgcggagcatcttatcgcctgtgaggcagacctcaacgccaaagacaga

SEQ ID NO: 578 - DNA, 99 bp, Artificial sequence
  Synthetic oligonucleotide
gaaggagataccccgttgcatgatgcggtgagactgaaccgctataagatgatccgactcctgattatgtatggcgcggatctcaacatcaagaactgt

SEQ ID NO: 579 - protein, 283 aa, Homo sapiens
MMVLKVEELVTGKKNGNGEAGEFLPEDFRDGEYEAAVTLEKQEDLKTLLAHPVTLGEQQWKSEKQREAELKKKKLEQRSKLENLEDLEIIIQLKKRKKYRKTKVPVVKEPEPEIIYKRTALHRACLEGHLAIVEKLMEAGAQIEFRDMLESTAIHWASRGGNLDVLKLLLNKGAKISARDKLLSTALHVAVRTGHYECAEHLIACEADLNAKDREGDTPLHDAVRLNRYKMIRLLIMYGADLNIKNCAGKTPMDLVLHWQNGTKAIFDSLRENSYKTSRIATF

SEQ ID NO: 580 - protein, 197 aa, Homo sapiens
MMVLKVEELVTGKKNGNGEAGEFLPEDFRDGEYEAAVTLEKQEDLKTLLAHPVTLGEQQWKSEKQREAELKKKKLEQRSKLENLEDLEIIIQLKKRKKYRKTKVPVVKEPEPEIITEPVDVPTFLKAALENKLPVVEKFLSDKNNPDVCDEYKRTALHRACLEGHLAIVEKLMEAGAQIEFRDMVNIFLCLGMSQKK

SEQ ID NO: 581 - protein, 177 aa, Homo sapiens
MMVLKVEELVTGKKNGNGEAGEFLPEDFRDGEYEAAVTLEKQEDLKTLLAHPVTLGEQQWKSEKQREAELKKKKLEQRSKLENLEDLEIIIQLKKRKKYRKTKVPVVKEPEPEIITEPVDVPTFLKAALENKLPVVEKFLSDKNNPDVCDEVRLMQSTAKSSSLILCFLCFTPVLLI

SEQ ID NO: 582 - protein, 286 aa, Homo sapiens
MMVLKVEELVTGKKNGNGEAGEFLPEDFRDGEYEAAVTLEKQEDLKTLLAHPVTLGEQQWKSEKQREAELKKKKLEQRSKLENLEDLEIIIQLKKRKKYRKTKVPVVKEPEPEIITEPVDVPTFLKAALENKLPVVEKFLSDKNNPDVCDELESTAIHWASRGGNLDVLKLLLNKGAKISARDKLLSTALHVAVRTGHYECAEHLIACEADLNAKDREGDTPLHDAVRLNRYKMIRLLIMYGADLNIKNCAGKTPMDLVLHWQNGTKAIFDSLRENSYKTSRIATF

SEQ ID NO: 583 - DNA, 25 bp, Artificial sequence
  Synthetic oligonucleotide
gctctggagaataaactgccagtag

SEQ ID NO: 584 - DNA, 28 bp, Artificial sequence
  Synthetic oligonucleotide
tattagcaagactggagtaaagcataag

SEQ ID NO: 585 - DNA, 150 bp, Artificial sequence
  Synthetic oligonucleotide
gctctggagaataaactgccagtagtagaaaaattcttgtcagacaagaacaatccagatgtttgtgatgaggtaagactcatgcaaagcactgcaaaatccagctcattaattttatgtttcttatgctttactccagtcttgctaata

SEQ ID NO: 586 - DNA, 20 bp, Artificial sequence
  Synthetic oligonucleotide
gcttggaaggacatttggca

SEQ ID NO: 587 - DNA, 20 bp, Artificial sequence
  Synthetic oligonucleotide
tggctcattcccaagcaaag

SEQ ID NO: 588 - DNA, 103 bp, Artificial sequence
  Synthetic oligonucleotide
gcttggaaggacatttggcaattgtggagaagttaatggaagctggagcccagatcgaattccgtgatatggtaaatatatttctttgcttgggaatgagcca

SEQ ID NO: 589 - DNA, 16 bp, Artificial sequence
  Synthetic oligonucleotide
cagcgctgcatgtggc

SEQ ID NO: 590 - DNA, 22 bp, Artificial sequence
  Synthetic oligonucleotide
caacggggtatctccttctctg

SEQ ID NO: 591 - DNA, 107 bp, Artificial sequence
  Synthetic oligonucleotide
cagcgctgcatgtggcggtgaggactggccactatgagtgcgcggagcatcttatcgcctgtgaggcagacctcaacgccaaagacagagaaggagataccccgttg

SEQ ID NO: 592 - DNA, 2816 bp, Homo sapiens
tcacagtttgctcatctataaagtgagcgaaagtaatgtaatctttattgggagtagggaacatgaaggcgagtcgatacagtaagtaagccgccaagcatattgctaggcacagagcaggtgtgcaacaaaagttatttctcaggctttccctcctctgagcgccgtcctccagagggtccggagtgtagctgggggttggagcagcagcctcctaggcgatgggacagagcccacagggtccggtatgccacggtttcttcgtcagaccctgggaatccaacgtcgcaaaataaacacggccgcgccgctaatcgccagttcggaggaaacaaaacagcgctgcgctgggggatctgggcaaaatcagccctccctcctcccgctccttcgccgcggccctcccctcctcgcgctgctctcgttcgcttggctcagctcagctcagctcagcgcagctccgcggccgccaagccgaggcgggcacggtctccgagtcgcggacgccagctccgagctccctctctccgccgcgcctccgccaggtcgcgccttcgtcgggaccacttcgggcaggagtcgcgtggcgaaggcctgcggccgcggcacaaagttgggggccgcgaagatgaggctgtccccggcgcccctgaagctgagccggactccggcactgctggccctggcgctgcccctggccgcggcgctggccttctccgacgagaccctggacaaagtgcccaagtcagagggctactgcagccgtatcctgcgcgcccagggcacgcggcgcgagggctacaccgagttcagcctccgcgtggagggcgaccccgacttctacaagccgggaaccagctaccgcgtaacactttcagctgctcctccctcctacttcagaggattcacattaattgccctcagagagaacagagagggtgataaggaagaagaccatgctgggaccttccagatcatagacgaagaagaaactcagtttatgagcaattgccctgttgcagtcactgaaagcactccacggaggaggacccggatccaggtgttttggatagcaccaccagcgggaacaggctgcgtgattctgaaggccagcatcgtacaaaaacgcattatttattttcaagatgagggctctctgaccaagaaactttgtgaacaagattccacatttgatggggtgactgacaaacccatcttagactgctgtgcctgcggaactgccaagtacagactcacattttatgggaattggtccgagaagacacacccaaaggattaccctcgtcgggccaaccactggtctgcgatcatcggaggatcccactccaagaattatgtactgtgggaatatggaggatatgccagcgaaggcgtcaaacaagttgcagaattgggctcacccgtgaaaatggaggaagaaattcgacaacagagtgatgaggtcctcaccgtcatcaaagccaaagcccaatggccagcctggcagcctctcaacgtgagagcagcaccttcagctgaattttccgtggacagaacgcgccatttaatgtccttcctgaccatgatgggccctagtcccgactggaacgtaggcttatctgcagaagatctgtgcaccaaggaatgtggctgggtccagaaggtggtgcaagacctgattccctgggacgctggcaccgacagcggggtgacctatgagtcacccaacaaacccaccattccccaggagaaaatccggcccctgaccagcctggaccatcctcagagtcctttctatgacccagagggtgggtccatcactcaagtagccagagttgtcatcgagagaatcgcacggaagggtgaacaatgcaatattgtacctgacaatgtcgatgatattgtagctgacctggctccagaagagaaagatgaagatgacacccctgaaacctgcatctactccaactggtccccatggtccgcctgcagctcctccacctgtgacaaaggcaagaggatgcgacagcgcatgctgaaagcacagctggacctcagcgtcccctgccctgacacccaggacttccagccctgcatgggccctggctgcagtgacgaagacggctccacctgcaccatgtccgagtggatcacctggtcgccctgcagcatctcctgcggcatgggcatgaggtcccgggagaggtatgtgaagcagttcccggaggacggctccgtgtgcacgctgcccactgaggaaacggagaagtgcacggtcaacgaggagtgctctcccagcagctgcctgatgaccgagtggggcgagtgggacgagtgcagcgccacctgcggcatgggcatgaagaagcggcaccgcatgatcaagatgaaccccgcagatggctccatgtgcaaagccgagacatcacaggcagagaagtgcatgatgccagagtgccacaccatcccatgcttgctgtccccatggtccgagtggagtgactgcagcgtgacctgcgggaagggcatgcgaacccgacagcggatgctcaagtctctggcagaacttggagactgcaatgaggatctggagcaggtggagaagtgcatgctccctgaatgccgtaagtcctggagctcctcaaggcccatcacttctatgttcctgagtccagggagccccgaaccagccagtgctaatactgctagatcctagaataacatggtttgctggggaagagtttggggtttggctttcagtgtttgcagttacttaaacactgcagtcagtttcattaataaagtgagaatcccac

SEQ ID NO: 593 - DNA, 2461 bp, Homo sapiens
tcacagtttgctcatctataaagtgagcgaaagtaatgtaatctttattgggagtagggaacatgaaggcgagtcgatacagtaagtaagccgccaagcatattgctaggcacagagcaggtgtgcaacaaaagttatttctcaggctttccctcctctgagcgccgtcctccagagggtccggagtgtagctgggggttggagcagcagcctcctaggcgatgggacagagcccacagggtccggtatgccacggtttcttcgtcagaccctgggaatccaacgtcgcaaaataaacacggccgcgccgctaatcgccagttcggaggaaacaaaacagcgctgcgctgggggatctgggcaaaatcagccctccctcctcccgctccttcgccgcggccctcccctcctcgcgctgctctcgttcgcttggctcagctcagctcagctcagcgcagctccgcggccgccaagccgaggcgggcacggtctccgagtcgcggacgccagctccgagctccctctctccgccgcgcctccgccaggtcgcgccttcgtcgggaccacttcgggcaggagtcgcgtggcgaaggcctgcggccgcggcacaaagttgggggccgcgaagatgaggctgtccccggcgcccctgaagctgagccggactccggcactgctggccctggcgctgcccctggccgcggcgctggccttctccgacgagaccctggacaaagtgcccaagtcagagggctactgcagccgtatcctgcgcgcccagggcacgcggcgcgagggctacaccgagttcagcctccgcgtggagggcgaccccgacttctacaagccgggaaccagctaccgcgtaacactttcagctgctcctccctcctacttcagaggattcacattaattgccctcagagagaacagagagggtgataaggaagaagaccatgctgggaccttccagatcatagacgaagaagaaactcagtttatgagcaattgccctgttgcagtcactgaaagcactccacggaggaggacccggatccaggtgttttggatagcaccaccagcgggaacaggctgcgtgattctgaaggccagcatcgtacaaaaacgcattatttattttcaagatgagggctctctgaccaagaaactttgtgaacaagattccacatttgatggggtgactgacaaacccatcttagactgctgtgcctgcggaactgccaagtacagactcacattttatgggaattggtccgagaagacacacccaaaggattaccctcgtcgggccaaccactggtctgcgatcatcggaggatcccactccaagaattatgtactgtgggaatatggaggatatgccagcgaaggcgtcaaacaagttgcagaattgggctcacccgtgaaaatggaggaagaaattcgacaacagagtgatgaggtcctcaccgtcatcaaagccaaagcccaatggccagcctggcagcctctcaacgtgtaagtaacacaagtcccttgcctggcctgtcttatcctagccccttctcaaagccacctacctaatggccaccacataccagttatgctgttgaagttagcactacttctcagttaacaagcaggcaagatgctttctatgtgcagagcatcacacctgccccatcttctcaaggatgcaggctcaggctctgttttcccccaatggctttaataccacagccagatgtgatggctttaataccaactcagatgggatgattaactgttctgtgttcactcatgctctcagccacaacagaccaaacatgccctcaccctcagagcacacaggtgtactcatgcttagccagtctgatgtgtggaaagccagatttaccctgggttccattctcagtcccgtttcttttctgtctcctctatcccagagagattttatctgcccttgagtcaggtgaccaagggtatgctgacagtccccaaaaaaacctcctgccaaatggatggatacagtggtatatccgtcaggtttttggacagctctccatggatggtccacctggaccttaaactcatcatgtccaaaatgggtcccatcaccttcaaacaaacctgctgttctccatgtggagaaatattgaaagtacagtgagtgtcaaaaccctgtggattctgccttctgggcagctcacaaatcagtccttacttgattctcctccccttccttcaagccatcaccctttctcacctggaccacgtcacctttttcctttgctgtagtctccctcagtccaattcctcatccacagttactagagtgatcttttaagaatccaaataccggccaggcgcagtggcttacgctgtaatctcagcattttaggaagccaaggcgggcagatcacgaggtcaggagatcgagaccatgctggccaacatggtg

SEQ ID NO: 594 - DNA, 1593 bp, Homo sapiens
tcacagtttgctcatctataaagtgagcgaaagtaatgtaatctttattgggagtagggaacatgaaggcgagtcgatacagtaagtaagccgccaagcatattgctaggcacagagcaggtgtgcaacaaaagttatttctcaggctttccctcctctgagcgccgtcctccagagggtccggagtgtagctgggggttggagcagcagcctcctaggcgatgggacagagcccacagggtccggtatgccacggtttcttcgtcagaccctgggaatccaacgtcgcaaaataaacacggccgcgccgctaatcgccagttcggaggaaacaaaacagcgctgcgctgggggatctgggcaaaatcagccctccctcctcccgctccttcgccgcggccctcccctcctcgcgctgctctcgttcgcttggctcagctcagctcagctcagcgcagctccgcggccgccaagccgaggcgggcacggtctccgagtcgcggacgccagctccgagctccctctctccgccgcgcctccgccaggtcgcgccttcgtcgggaccacttcgggcaggagtcgcgtggcgaaggcctgcggccgcggcacaaagttgggggccgcgaagatgaggctgtccccggcgcccctgaagctgagccggactccggcactgctggccctggcgctgcccctggccgcggcgctggccttctccgacgagaccctggacaaagtgcccaagtcagagggctactgcagccgtatcctgcgcgcccagggcacgcggcgcgagggctacaccgagttcagcctccgcgtggagggcgaccccgacttctacaagccgggaaccagctaccgcgtaacactttcagctgctcctccctcctacttcagaggattcacattaattgccctcagagagaacagagagggtgataaggaagaagaccatgctgggaccttccagatcatagacgaagaagaaactcagtttatgagcaattgccctgttgcagtcactgaaagcactccacggaggaggacccggatccaggtgttttggatagcaccaccagcgggaacaggctgcgtgattctgaaggccagcatcgtacaaaaacgcattatttattttcaagatgagggctctctgaccaagaaactttgtgaacaagattccacatttgatggggtgactgacaaacccatcttagactgctgtgcctgcggaactgccaagtacagactcacattttatgggaattggtccgagaagacacacccaaaggattaccctcgtcgggccaaccactggtctgcgatcatcggaggatcccactccaagaattatgtactgtgggaatatggaggatatgccagcgaaggcgtcaaacaagttgcagaattgggctcacccgtgaaaatggaggaagaaattcgacaacaggtaagacaaaaaaatcacagaatgaccaaataacagaaatgcagtcaaagcactccttagatatctttcccaggggcttgaaatttgcagtacaatgtggtggaagaaaatctatttgctgagtttgggggttttatgtt

SEQ ID NO: 595 - DNA, 866 bp, Artificial sequence
  Synthetic oligonucleotide
tcacagtttgctcatctataaagtgagcgaaagtaatgtaatctttattgggagtagggaacatgaaggcgagtcgatacagtaagtaagccgccaagcatattgctaggcacagagcaggtgtgcaacaaaagttatttctcaggctttccctcctctgagcgccgtcctccagagggtccggagtgtagctgggggttggagcagcagcctcctaggcgatgggacagagcccacagggtccggtatgccacggtttcttcgtcagaccctgggaatccaacgtcgcaaaataaacacggccgcgccgctaatcgccagttcggaggaaacaaaacagcgctgcgctgggggatctgggcaaaatcagccctccctcctcccgctccttcgccgcggccctcccctcctcgcgctgctctcgttcgcttggctcagctcagctcagctcagcgcagctccgcggccgccaagccgaggcgggcacggtctccgagtcgcggacgccagctccgagctccctctctccgccgcgcctccgccaggtcgcgccttcgtcgggaccacttcgggcaggagtcgcgtggcgaaggcctgcggccgcggcacaaagttgggggccgcgaagatgaggctgtccccggcgcccctgaagctgagccggactccggcactgctggccctggcgctgcccctggccgcggcgctggccttctccgacgagaccctggacaaagtgcccaagtcagagggctactgcagccgtatcctgcgcgcccagggcacgcggcgcgagggctacaccgagttcagcctccgcgtggagggcgaccccgacttctacaagccgggaaccagctaccgcg

SEQ ID NO: 596 - DNA, 149 bp, Artificial sequence
  Synthetic oligonucleotide
gtcgggccaaccactggtctgcgatcatcggaggatcccactccaagaattatgtactgtgggaatatggaggatatgccagcgaaggcgtcaaacaagttgcagaattgggctcacccgtgaaaatggaggaagaaattcgacaacag

SEQ ID NO: 597 - DNA, 140 bp, Artificial sequence
  Synthetic oligonucleotide
gtaagacaaaaaaatcacagaatgaccaaataacagaaatgcagtcaaagcactccttagatatctttcccaggggcttgaaatttgcagtacaatgtggtggaagaaaatctatttgctgagtttgggggttttatgtt

SEQ ID NO: 598 - DNA, 943 bp, Artificial sequence
  Synthetic oligonucleotide
gtaagtaacacaagtcccttgcctggcctgtcttatcctagccccttctcaaagccacctacctaatggccaccacataccagttatgctgttgaagttagcactacttctcagttaacaagcaggcaagatgctttctatgtgcagagcatcacacctgccccatcttctcaaggatgcaggctcaggctctgttttcccccaatggctttaataccacagccagatgtgatggctttaataccaactcagatgggatgattaactgttctgtgttcactcatgctctcagccacaacagaccaaacatgccctcaccctcagagcacacaggtgtactcatgcttagccagtctgatgtgtggaaagccagatttaccctgggttccattctcagtcccgtttcttttctgtctcctctatcccagagagattttatctgcccttgagtcaggtgaccaagggtatgctgacagtccccaaaaaaacctcctgccaaatggatggatacagtggtatatccgtcaggtttttggacagctctccatggatggtccacctggaccttaaactcatcatgtccaaaatgggtcccatcaccttcaaacaaacctgctgttctccatgtggagaaatattgaaagtacagtgagtgtcaaaaccctgtggattctgccttctgggcagctcacaaatcagtccttacttgattctcctccccttccttcaagccatcaccctttctcacctggaccacgtcacctttttcctttgctgtagtctccctcagtccaattcctcatccacagttactagagtgatcttttaagaatccaaataccggccaggcgcagtggcttacgctgtaatctcagcattttaggaagccaaggcgggcagatcacgaggtcaggagatcgagaccatgctggccaacatggtg

SEQ ID NO: 599 - DNA, 202 bp, Artificial sequence
  Synthetic oligonucleotide
gagagcagcaccttcagctgaattttccgtggacagaacgcgccatttaatgtccttcctgaccatgatgggccctagtcccgactggaacgtaggcttatctgcagaagatctgtgcaccaaggaatgtggctgggtccagaaggtggtgcaagacctgattccctgggacgctggcaccgacagcggggtgacctatgag

SEQ ID NO: 600 - DNA, 141 bp, Artificial sequence
  Synthetic oligonucleotide
tcacccaacaaacccaccattccccaggagaaaatccggcccctgaccagcctggaccatcctcagagtcctttctatgacccagagggtgggtccatcactcaagtagccagagttgtcatcgagagaatcgcacggaag

SEQ ID NO: 601 - DNA, 183 bp, Artificial sequence
  Synthetic oligonucleotide
atgacacccctgaaacctgcatctactccaactggtccccatggtccgcctgcagctcctccacctgtgacaaaggcaagaggatgcgacagcgcatgctgaaagcacagctggacctcagcgtcccctgccctgacacccaggacttccagccctgcatgggccctggctgcagtgacgaag

SEQ ID NO: 602 - DNA, 158 bp, Artificial sequence
  Synthetic oligonucleotide
acggctccacctgcaccatgtccgagtggatcacctggtcgccctgcagcatctcctgcggcatgggcatgaggtcccgggagaggtatgtgaagcagttcccggaggacggctccgtgtgcacgctgcccactgaggaaacggagaagtgcacggtc

SEQ ID NO: 603 - DNA, 165 bp, Artificial sequence
  Synthetic oligonucleotide
acaccatcccatgcttgctgtccccatggtccgagtggagtgactgcagcgtgacctgcgggaagggcatgcgaacccgacagcggatgctcaagtctctggcagaacttggagactgcaatgaggatctggagcaggtggagaagtgcatgctccctgaatgcc

SEQ ID NO: 604 - DNA, 192 bp, Artificial sequence
  Synthetic oligonucleotide
gtaagtcctggagctcctcaaggcccatcacttctatgttcctgagtccagggagccccgaaccagccagtgctaatactgctagatcctagaataacatggtttgctggggaagagtttggggtttggctttcagtgtttgcagttacttaaacactgcagtcagtttcattaataaagtgagaatcccac

SEQ ID NO: 605 - DNA, 107 bp, Artificial sequence
  Synthetic oligonucleotide
taacactttcagctgctcctccctcctacttcagaggattcacattaattgccctcagagagaacagagagggtgataaggaagaagaccatgctgggaccttccag

SEQ ID NO: 606 - DNA, 52 bp, Artificial sequence
  Synthetic oligonucleotide
atcatagacgaagaagaaactcagtttatgagcaattgccctgttgcagtca

SEQ ID NO: 607 - DNA, 82 bp, Artificial sequence
  Synthetic oligonucleotide
ctgaaagcactccacggaggaggacccggatccaggtgttttggatagcaccaccagcgggaacaggctgcgtgattctgaa

SEQ ID NO: 608 - DNA, 74 bp, Artificial sequence
  Synthetic oligonucleotide
ggccagcatcgtacaaaaacgcattatttattttcaagatgagggctctctgaccaagaaactttgtgaacaag

SEQ ID NO: 609 - DNA, 107 bp, Artificial sequence
  Synthetic oligonucleotide
attccacatttgatggggtgactgacaaacccatcttagactgctgtgcctgcggaactgccaagtacagactcacattttatgggaattggtccgagaagacacac

SEQ ID NO: 610 - DNA, 16 bp, Artificial sequence
  Synthetic oligonucleotide
ccaaaggattaccctc

SEQ ID NO: 611 - DNA, 65 bp, Artificial sequence
  Synthetic oligonucleotide
agtgatgaggtcctcaccgtcatcaaagccaaagcccaatggccagcctggcagcctctcaacgt

SEQ ID NO: 612 - DNA, 76 bp, Artificial sequence
  Synthetic oligonucleotide
ggtgaacaatgcaatattgtacctgacaatgtcgatgatattgtagctgacctggctccagaagagaaagatgaag

SEQ ID NO: 613 - DNA, 13 bp, Artificial sequence
  Synthetic oligonucleotide
aacgaggagtgct

SEQ ID NO: 614 - DNA, 55 bp, Artificial sequence
  Synthetic oligonucleotide
ctcccagcagctgcctgatgaccgagtggggcgagtgggacgagtgcagcgccac

SEQ ID NO: 615 - DNA, 113 bp, Artificial sequence
  Synthetic oligonucleotide
ctgcggcatgggcatgaagaagcggcaccgcatgatcaagatgaaccccgcagatggctccatgtgcaaagccgagacatcacaggcagagaagtgcatgatgccagagtgcc

SEQ ID NO: 616 - protein, 807 aa, Homo sapiens
MRLSPAPLKLSRTPALLALALPLAAALAFSDETLDKVPKSEGYCSRILRAQGTRREGYTEFSLRVEGDPDFYKPGTSYRVTLSAAPPSYFRGFTLIALRENREGDKEEDHAGTFQIIDEEETQFMSNCPVAVTESTPRRRTRIQVFWIAPPAGTGCVILKASIVQKRIIYFQDEGSLTKKLCEQDSTFDGVTDKPILDCCACGTAKYRLTFYGNWSEKTHPKDYPRRANHWSAIIGGSHSKNYVLWEYGGYASEGVKQVAELGSPVKMEEEIRQQSDEVLTVIKAKAQWPAWQPLNVRAAPSAEFSVDRTRHLMSFLTMMGPSPDWNVGLSAEDLCTKECGWVQKVVQDLIPWDAGTDSGVTYESPNKPTIPQEKIRPLTSLDHPQSPFYDPEGGSITQVARVVIERIARKGEQCNIVPDNVDDIVADLAPEEKDEDDTPETCIYSNWSPWSACSSSTCDKGKRMRQRMLKAQLDLSVPCPDTQDFQPCMGPGCSDEDGPTCTMSEWITWSPCSISCGMGMRSRERYVKQFPEDGSVCTLPTEETEKCTVNEECSPSSCLMTEWGEWDEYSATCGMGMKKRHRMIKMNPADGSMCKAETSQAEKRMMPECHTIPCLLSPWSEWSDCSVTCGKGMRTRQRMLKSLAELGDCNEDLEQVEKCMLPECPIDCELTEWSQWSECNKSCGKGHVIRTRMIQMEPQFGGAPCPETVQRKKCRIRKCLRNPSIQKLRWREARESRRSEQLKEESEGEQFPGCRMRPWTAWSECTKLCGGGIQERYMTVKKRFKSSQFTSCKDKKEIRACNVHPC

SEQ ID NO: 617 - protein, 807 aa, Homo sapiens [sequence omitted]

SEQ ID NO: 618 - protein, 724 aa, Homo sapiens
AAPPSYFRGFTLIALRENREGDKEEDHAGTFQIIDEEETQFMSNCPVAVTESTPRRRTRIQVFWIAPPAGTGCVILKASIVQKRIIYFQDEGSLTKKLCEQDSTFDGVTDKPILDCCACGTAKYRLTFYGNWSEKTHPKDYPRRANHWSAIIGGSHSKNYVLWEYGGYASEGVKQVAELGSPVKMEEEIRQQSDEVLTVIKAKAQWPAWQPLNVRAAPSAEFSVDRTRHLMSFLTMMGPSPDWNVGLSAEDLCTKECGWVQKVVQDLIPWDAGTDSGVTYESPNKPTIPQEKIRPLTSLDHPQSPFYDPEGGSITQVARVVIERIARKGEQCNIVPDNVDDIVADLAPEEKDEDDTPETCIYSNWSPWSACSSSTCDKGKRMRQRMLKAQLDLSVPCPDTQDFQPCMGPGCSDEDGSTCTMSEWITWSPCSISCGMGMRSRERYVKQFPEDGSVCTLPTEETEKCTVNEECSPSSCLMTEWGEWDECSATCGMGMKKRHRMIKMNPADGSMCKAETSQAEKCMMPECHTIPCLLSPWSEWSDCSVTCGKGMRTRQRMLKSLAELGDCNEDLEQVEKCMLPECPIDCELTEWSQWSECNKSCGKGHVIRTRMIQMEPQFGGAPCPETVQRKKCRIRKCLRNPSIQKLRWREARESRRSEQLKEESEGEQFPGCRMRPWTAWSECTKLCGGGIQERYMTVKKRFKSSQFTSCKDKKEIRACNVHPC

SEQ ID NO: 619 - protein, 695 aa, Homo sapiens
MRLSPAPLKLSRTPALLALALPLAAALAFSDETLDKVPKSEGYCSRILRAQGTRREGYTEFSLRVEGDPDFYKPGTSYRVTLSAAPPSYFRGFTLIALRENREGDKEEDHAGTFQIIDEEETQFMSNCPVAVTESTPRRRTRIQVFWIAPPAGTGCVILKASIVQKRIIYFQDEGSLTKKLCEQDSTFDGVTDKPILDCCACGTAKYRLTFYGNWSEKTHPKDYPRRANHWSAIIGGSHSKNYVLWEYGGYASEGVKQVAELGSPVKMEEEIRQQSDEVLTVIKAKAQWPAWQPLNVRAAPSAEFSVDRTRHLMSFLTMMGPSPDWNVGLSAEDLCTKECGWVQKVVQDLIPWDAGTDSGVTYESPNKPTIPQEKIRPLTSLDHPQSPFYDPEGGSITQVARVVIERIARKGEQCNIVPDNVDDIVADLAPEEKDEDDTPETCIYSNWSPWSACSSSTCDKGKRMRQRMLKAQLDLSVPCPDTQDFQPCMGPGCSDEDGSTCTMSEWITWSPCSISCGMGMRSRERYVKQFPEDGSVCTLPTEETEKCTVNEECSPSSCLMTEWGEWDECSATCGMGMKKRHRMIKMNPADGSMCKAETSQAEKCMMPECHTIPCLLSPWSEWSDCSVTCGKGMRTRQRMLKSLAELGDCNEDLEQVEKCMLPECRKSWSSSRPITSMFLSPGSPEPASANTARS

SEQ ID NO: 620 - protein, 297 aa, Homo sapiens
MRLSPAPLKLSRTPALLALALPLAAALAFSDETLDKVPKSEGYCSRILRAQGTRREGYTEFSLRVEGDPDFYKPGTSYRVTLSAAPPSYFRGFTLIALRENREGDKEEDHAGTFQIIDEEETQFMSNCPVAVTESTPRRRTRIQVFWIAPPAGTGCVILKASIVQKRIIYFQDEGSLTKKLCEQDSTFDGVTDKPILDCCACGTAKYRLTFYGNWSEKTHPKDYPRRANHWSAIIGGSHSKNYVLWEYGGYASEGVKQVAELGSPVKMEEEIRQQSDEVLTVIKAKAQWPAWQPLNV

SEQ ID NO: 621 - protein, 285 aa, Homo sapiens
MRLSPAPLKLSRTPALLALALPLAAALAFSDETLDKVPKSEGYCSRILRAQGTRREGYTEFSLRVEGDPDFYKPGTSYRVTLSAAPPSYFRGFTLIALRENREGDKEEDHAGTFQIIDEEETQFMSNCPVAVTESTPRRRTRIQVFWIAPPAGTGCVILKASIVQKRIIYFQDEGSLTKKLCEQDSTFDGVTDKPILDCCACGTAKYRLTFYGNWSEKTHPKDYPRRANHWSAIIGGSHSKNYVLWEYGGYASEGVKQVAELGSPVKMEEEIRQQVRQKNHRMTK

SEQ ID NO: 622 - DNA, 19 bp, Artificial sequence
  Synthetic oligonucleotide
agctcctcaaggcccatca

SEQ ID NO: 623 - DNA, 21 bp, Artificial sequence
  Synthetic oligonucleotide
aactcttccccagcaaaccat

SEQ ID NO: 624 - DNA, 108 bp, Artificial sequence
  Synthetic oligonucleotide
agctcctcaaggcccatcacttctatgttcctgagtccagggagccccgaaccagccagtgctaatactgctagatcctagaataacatggtttgctggggaagagtt

SEQ ID NO: 625 - DNA, 21 bp, Artificial sequence
  Synthetic oligonucleotide
tcccagtggtcggaatgtaac

SEQ ID NO: 626 - DNA, 20 bp, Artificial sequence
  Synthetic oligonucleotide
gcacttttttcgctgcacag

SEQ ID NO: 627 - DNA, 123 bp, Artificial sequence
  Synthetic oligonucleotide
tcccagtggtcggaatgtaacaagtcatgtgggaaaggccacgtgattcgaacccggatgatccaaatggagcctcagtttggaggtgcaccctgcccagagactgtgcagcgaaaaaagtgc

SEQ ID NO: 628 - protein, 37 aa, Artificial sequence
  Synthetic peptide
LWLTPVIPTLWEADGGGLHEPWSWRPAWATWLQRNYL

SEQ ID NO: 629 - protein, 47 aa, Artificial sequence
  Synthetic peptide
HWQISQWWLHFQTPREEGKMKLLELSESADGAAWKRWGGNSNTHRIQ

SEQ ID NO: 630 - DNA, 50 bp, Homo sapiens; identical to SEQ ID NO: 26

SEQ ID NO: 631 - protein, 10 aa, Artificial sequence
  Synthetic peptide
NETEAEQSYV

SEQ ID NO: 632 - protein, 15 aa, Artificial sequence
  Synthetic peptide
MSSWLSAGSPSSLSV

SEQ ID NO: 633 - protein, 13 aa, Artificial sequence
  Synthetic peptide
MCRGYSTLLNPVS

SEQ ID NO: 634 - protein, 6 aa, Artificial sequence
  Synthetic peptide
SRNWTQ

SEQ ID NO: 635 - protein, 99 aa, Artificial sequence
  Synthetic peptide
VRWATLELYLIGYYYCSFSQACSKKPSPPLRAVEAGTREWLWVRVVSGGNFLCSGFGLTQAGTQILPYRLHDCGQITFSKCNCKTGINNTNLVGLLGSL

SEQ ID NO: 636 - protein, 62 aa, Artificial sequence
  Synthetic peptide
DVLTAWPSIYRRQVKVLREDEITILPWHLQWSREKATKLLRPTLPSYNNHGWEELRVGKSIV

SEQ ID NO: 637 - protein, 10 aa, Artificial sequence
  Synthetic peptide
MEKLQLRNVK

SEQ ID NO: 638 - protein, 11 aa, Artificial sequence
  Synthetic peptide
AHILITFPLPS

SEQ ID NO: 639 - DNA, 50 bp, Homo sapiens; identical to SEQ ID NO: 25

SEQ ID NO: 640 - protein, 33 aa, Artificial sequence
  Synthetic peptide
GKHPLPPRPPSPIPVCDTVRVTLGFVVSGNHTL

SEQ ID NO: 641 - protein, 31 aa, Artificial sequence
  Synthetic peptide
VRAEGSSGGLDSSNERVLTCCPKRPSSFLWN

SEQ ID NO: 642 - protein, 52 aa, Artificial sequence
  Synthetic peptide
VRGTGDGNGMGWTLLGDTFSRKGTNAEAHSLSSFCPNTQSAPWVSGHAIYCP

SEQ ID NO: 643 - protein, 39 aa, Artificial sequence
  Synthetic peptide
VGPGKRVQSGARGLSDAVLTPLDFLQVSEVYPFPCIFLF

SEQ ID NO: 644 - protein, 49 aa, Artificial sequence
  Synthetic peptide
VRRTPDTGSRCGSFFSGPTAPPSQGSSHLLLEMLLVDLTFFSRSAVSLT

SEQ ID NO: 645 - protein, 10 aa, Artificial sequence
  Synthetic peptide
VRPSGEGGQA

SEQ ID NO: 646 - protein, 26 aa, Artificial sequence
  Synthetic peptide
GVLGVQEARDELVGGRAMQGQGEHRL

SEQ ID NO: 647 - protein, 25 aa, Artificial sequence
  Synthetic peptide
VSDRPPSASPKDRNKALGPGQATVL

SEQ ID NO: 648 - protein, 22 aa, Artificial sequence
  Synthetic peptide
MGLWKPGSVLSDSLFASSPCPQ

SEQ ID NO: 649 - protein, 28 aa, Artificial sequence
  Synthetic peptide
VPPWPHHLCPLLCHPDKVVAESLLHPRN

SEQ ID NO: 650 - protein, 21 aa, Artificial sequence
  Synthetic peptide
VSESGHWPGVWFGSRVLIIMS

SEQ ID NO: 651 - protein, 22 aa, Artificial sequence
  Synthetic peptide
AFLILWLFWETPPLFHTNLVGL

SEQ ID NO: 652 - protein, 51 aa, Artificial sequence
  Synthetic peptide
ALGVRQLVGGGHSSRFSHLVVAGLPHACHRKSGSSSQVLCPEPSALLSVAG

SEQ ID NO: 653 - protein, 24 aa, Artificial sequence
  Synthetic peptide
ELGFPSSTGRDESLEHCRCQGLHK

SEQ ID NO: 654 - protein, 11 aa, Artificial sequence
  Synthetic peptide
TTGVSTPAPGV

SEQ ID NO: 655 - protein, 15 aa, Artificial sequence
  Synthetic peptide
VRPCLPVPLLLCWPL

SEQ ID NO: 656 - protein, 11 aa, Artificial sequence
  Synthetic peptide
TTGVSTPAPGV

SEQ ID NO: 657 - protein, 17 aa, Artificial sequence
  Synthetic peptide
LVDSLLQVLNVKEGTPS

SEQ ID NO: 658 - protein, 8 aa, Artificial sequence
  Synthetic peptide
TLCSRFST

SEQ ID NO: 659 - protein, 15 aa, Artificial sequence
  Synthetic peptide
DSLLQVLNVKEGTPS

SEQ ID NO: 660 - protein, 23 aa, Artificial sequence
  Synthetic peptide
GMYVISFHQIYKISRNQHSCFYF

SEQ ID NO: 661 - protein, 10 aa, Artificial sequence
  Synthetic peptide
EACFPGHAQL

SEQ ID NO: 662 - protein, 24 aa, Artificial sequence
  Synthetic peptide
RLAHRATRCAWGEPGRRKRREKEK

SEQ ID NO: 663 - protein, 19 aa, Artificial sequence
  Synthetic peptide
LNEQNLIQEVPNIWQREVG

SEQ ID NO: 664 - protein, 95 aa, Artificial sequence
  Synthetic peptide
APRRRTAACGSCTLTSARTSAGSGSTSPRATMPTSASGPAPTFGAWTRSTARSWPCTTSITRAPRRRRAACRRRWSRCPSCTTWAASPRWSSCPT

SEQ ID NO: 665 - protein, 13 aa, Artificial sequence
  Synthetic peptide
VNIFLCLGMSQKK

SEQ ID NO: 666 - protein, 26 aa, Artificial sequence
  Synthetic peptide
VRLMQSTAKSSSLILCFLCFTPVLLI

SEQ ID NO: 667 - protein, 30 aa, Artificial sequence
  Synthetic peptide
RKSWSSSRPITSMFLSPGSPEPASANTARS

SEQ ID NO: 668 - protein, 83 aa, Artificial sequence
  Synthetic peptide
MRLSPAPLKLSRTPALLALALPLAAALAFSDETLDKVPKSEGYCSRILRAQGTRREGYTEFSLRVEGDPDFYKPGTSYRVTLS

SEQ ID NO: 669 - protein, 83 aa, Artificial sequence; identical to SEQ ID NO: 668
  Synthetic peptide

SEQ ID NO: 670 - protein, 10 aa, Artificial sequence
  Synthetic peptide
VRQKNHRMTK

SEQ ID NO: 671 - protein, 83 aa, Artificial sequence; identical to SEQ ID NO: 668
  Synthetic peptide

SEQ ID NO: 672 - protein, 39 aa, Artificial sequence
  Synthetic peptide
VSLCQQAGVQWYDLGSLQPLPPGFKQFSCLSLLSSWDYR

SEQ ID NO: 673 - protein, 30 aa, Artificial sequence
  Synthetic peptide
MELAALCRWGLLLALLPPGAASTQVCTGTD

SEQ ID NO: 674 - protein, 39 aa, Artificial sequence
  Synthetic peptide
MKLRLPASPETHLDMLRHLYQGCQVVQGNLELTYLPTNA

SEQ ID NO: 675 - protein, 235 aa, Artificial sequence
  Synthetic peptide
VCYGLGMEHLREVRAVTSANIQEFAGCKKIFGSLAFLPESFDGDPASNTAPLQPEQLQVFETLEEITGYLYISAWPDSLPDLSVFQNLQVIRGRILHNGAYSLTLQGLGISWLGLRSLRELGSGLALIHHNTHLCFVHTVPWDQLFRNPHQALLHTANRPEDECGKTGSPVCALPICQHTAVPRGPWQQRSWTCADCPSLCTLLDSAQLWLAWPLGMASLAGSYLPWHPSLPLCF

SEQ ID NO: 676 - protein, 274 aa, Artificial sequence
  Synthetic peptide
VCYGLGMEHLREVRAVTSANIQEFAGCKKIFGSLAFLPESFDGVSLCQQAGVQWYDLGSLQPLPPGFKQFSCLSLLSSWDYRDPASNTAPLQPEQLQVFETLEEITGYLYISAWPDSLPDLSVFQNLQVIRGRILHNGAYSLTLQGLGISWLGLRSLRELGSGLALIHHNTHLCFVHTVPWDQLFRNPHQALLHTANRPEDECGKTGSPVCALPICQHTAVPRGPWQQRSWTCADCPSLCTLLDSAQLWLAWPLGMASLAGSYLPWHPSLPLCF

SEQ ID NO: 677 - protein, 45 aa, Artificial sequence
  Synthetic peptide
QPPTLPRSSQSSSKCLRLWKRSQVTYTSQHGRTACLTSASSRTCK

SEQ ID NO: 678 - protein, 30 aa, Artificial sequence
  Synthetic peptide
RLAWTPGCTLHCPSLPHWMLGGHCCREGTP

SEQ ID NO: 679 - protein, 30 aa, Artificial sequence; identical to SEQ ID NO: 673
  Synthetic peptide

SEQ ID NO: 680 - protein, 338 aa, Artificial sequence
  Synthetic peptide
VCYGLGMEHLREVRAVTSANIQEFAGCKKIFGSLAFLPESFDGDPASNTAPLQPEQLQVFETLEEITGYLYISAWPDSLPDLSVFQNLQVIRGRILHNGAYSLTLQGLGISWLGLRSLRELGSGLALIHHNTHLCFVHTVPWDQLFRNPHQALLHTANRPEDECVGEGLACHQLCARGHCWGPGPTQCVNCSQFLRGQECVEECRVLQGLPREYVNARHCLPCHPECQPQNGSVTCFGPEADQCVACAHYKDPPFCVARCPSGVKPDLSYMPIWKFPDEEGACQPCPINCTHSCVDLDDKGCPAEQRARLAWTPGCTLHCPSLPHWMLGGHCCREGTP

SEQ ID NO: 681 - protein, 39 aa, Artificial sequence; identical to SEQ ID NO: 672
  Synthetic peptide

SEQ ID NO: 682 - protein, 30 aa, Artificial sequence; identical to SEQ ID NO: 678
  Synthetic peptide

SEQ ID NO: 683 - protein, 30 aa, Artificial sequence; identical to SEQ ID NO: 673
  Synthetic peptide

SEQ ID NO: 684 - protein, 39 aa, Artificial sequence; identical to SEQ ID NO: 674
  Synthetic peptide

SEQ ID NO: 685 - DNA, 50 bp, Homo sapiens; identical to SEQ ID NO: 17

SEQ ID NO: 686 - DNA, 50 bp, Homo sapiens; identical to SEQ ID NO: 18

SEQ ID NO: 687 - DNA, 50 bp, Homo sapiens; identical to SEQ ID NO: 19

SEQ ID NO: 688 - DNA, 50 bp, Homo sapiens; identical to SEQ ID NO: 20

SEQ ID NO: 689 - DNA, 50 bp, Homo sapiens; identical to SEQ ID NO: 21

SEQ ID NO: 690 - DNA, 50 bp, Homo sapiens; identical to SEQ ID NO: 22

SEQ ID NO: 691 - DNA, 50 bp, Homo sapiens; identical to SEQ ID NO: 23

SEQ ID NO: 692 - DNA, 50 bp, Homo sapiens; identical to SEQ ID NO: 24

SEQ ID NO: 693 - protein, 319 aa, Homo sapiens
MMVLKVEELVTGKKNGNGEAGEFLPEDFRDGEYEAAVTLEKQEDLKTLLAHPVTLGEQQWKSEKQREAELKKKKLEQRSKLENLEDLEIIIQLKKRKKYRKTKVPVVKEPEPEIITEPVDVPTFLKAALENKLPVVEKFLSDKNNPDVCDEYKRTALHRACLEGHLAIVEKLMEAGAQIEFRDMLESTAIHWASRGGNLDVLKLLLNKGAKISARDKLLSTALHVAVRTGHYECAEHLIACEADLNAKDREGDTPLHDAVRLNRYKMIRLLIMYGADLNIKNCAGKTPMDLVLHWQNGTKAIFDSLRENSYKTSRIATF

SEQ ID NO: 694 - protein, 319 aa, Homo sapiens
MMVLKVEELVTGKKNGNGEAGEFLPEDFRDGEYEAAVTLEKQEDLKTLLAHPVTLGEQQWKSEKQREAELPKKKLEQRSKLENLEDLEIIIQLKKRKKYRKTKVPVVKEPEPEIITEPVDVPTFLKAALENKLPVVEKFLSDKNNPDVCDEYKRTALHRACLEGHLAIVEKLMEAGAQIEFRDMLESTAIHWASRGGNLDVLKLLLNKGAKISARDKLLSTALHVAVRTGHYECAEHLIACEADLNAKDREGDTPLHDAVRLNRYKMIRLLIMYGADLNIKNCAGKTPMDLVLHWQNGTKAIFDSLRENSYKTSRIATF

SEQ ID NO: 695 - protein, 166 aa, Homo sapiens; identical to SEQ ID NO: 426

SEQ ID NO: 696 - DNA, 8691 bp, Homo sapiens
aggaagcggaaagcagcagtgcagcggcggcggcggcggggctctgcctctccaggagcccagcgcaggccgcagagccggggccgctgtgagccgagaccgcgggccgcggagctcgggcggccggcgcggagaatttgttcctgttgaagagtggctcctcttctaatttccagactccttgaggttttaggagtctggtaggtgaaattttctacctctaaggagaaacagtacctgctccttcctcaagcgcaagccctccattgctatggataccgaatccacttattctggatattcttactattcaagtcattcgaaaaaatctcacagacaaggggaaagaactagagagagacacaagtcaccccggaataaagacggcagagggtcagaaaagtctgtcaccattcaacctcccactggagagcccctgttgggaaatgattctactcggacagaggaagttcaggatgacaactggggagagaccaccacggccatcacaggcacctcggagcacagcatatcccaagaggacattgccaggatcagcaaggacatggaggacagcgtggggctggattgcaaacgctacctgggcctcaccgtcgcctcttttcttggacttctagttttcctcacccctattgccttcatccttttacctccgatcctgtggagggatgagctggagccttgtggcacaatttgtgaggggctctttatctccatggcattcaaactcctcattctgctcatagggacctgggcactttttttccgcaagcggagagctgacatgccacgggtgtttgtgtttcgtgcccttttgttggtcctcatctttctctttgtggtttcctattggcttttttacggggtccgcattttggactctcgggaccggaattaccagggcattgtgcaatatgcagtctcccttgtggatgccctcctcttcatccattacctggccatcgtcctgctggagctcaggcagctgcagcccatgttcacgctgcaggtggtccgctccaccgatggcgagtcccgcttctacagcctgggacacctgagtatccagcgagcagcattggtggtcctagaaaattactacaaagatttcaccatctataacccaaacctcctaacagcctccaaattccgagcagccaagcatatggccgggctgaaagtctacaatgtagatggccccagtaacaatgccactggccagtcccgggccatgattgctgcagctgctcggcgcagggactcaagccacaacgagttgtattatgaagaggccgaacatgaacggcgagtaaagaagcggaaagcaaggctggtggttgcagtggaagaggccttcatccacattcagcgtctccaggctgaggagcagcagaaagccccaggggaggtgatggaccctagggaggccgcccaggccattttcccctccatggccagggctctccagaagtacctgcgcatcacccggcagcagaactaccacagcatggagagcatcctgcagcacctggccttctgcatcaccaacggcatgacccccaaggccttcctagaacggtacctcagtgcgggccccaccctgcaatatgacaaggaccgctggctctctacacagtggaggcttgtcagtgatgaggctgtgactaatggattacgggatggaattgtgttcgtccttaagtgcttggacttcagcctcgtagtcaatgtgaagaaaattccattcatcatactctctgaagagttcatagaccccaaatctcacaaatttgtccttcgcttacagtctgagacatccgtttaaaagttctatatttgtggctttattaaaaaaaaaagaaaaatatatagagagatatatatctatgccagaggggtgtcttttttaaaaattcttcttcattgctgactgaaactggcagatgattgaccagtatcctttgaccatctgcactttatttggaaggaagcaggggctgtccaccctgaaaaagagtgactgatgacatctgacttttgtcgatgggacttctcaagaagccattccttggagcttctgttacagctgtaaaccaaagtggagctggtgcttcttgggagcctcgccttacaactaattcctgcctttcgtccagtaccaagtcccccgttgcttctggtcagcccacttgtagacttccaggggacacatctttattctgtttcaggaaaccagtcacgacacgtccacatatgtatttgtgtatgttaatgtccagtatcacatcacccatgaaagtcgtgggcagttcaggagatacctgccttcatctttgttctttgttgccttaggttcttcagagaaagatcacaacaaaaaatgtacactgtcgtttacagctattaagtgatttgattttgtttttttcccaaagagaaaacctacctgccctgtttctgatcccacccctctgctggcttgaagcaggtaaccctttcccagccctgcagctgcccacctggcctccatgccatcctgcccccacctggctggcagccctggctctccatgtgtgccctccggctctgtgtgaagcctcaagtcagtcccagcattgtttccatagggaagtgtggggtgcccagcaggtaaagcacagggagagagggcagtgggaatgccacctttaggctgcagcaggagccccacactgcccagttttcctccccactgttctacaccaaccaggggagactaacactgtgactctgggattggcaggtgcaacttggagccacttaatttcctggggacgtaagttcttcccaagcttagagcaagctgccctgccaaaggagaccaaaccatgccaaccacgctggcaactgctgctgtccagtccctgtgttttctgaccaccgtcactgtgcaactcatcgcctctgccacttaggaccaggaaagaggctggttttgctcccactcttagttgctgataaagtggggagaaggaaaatggacactctacagagtttggggaagggagagtagggagcccatcttgtccagaaagattcatctgtggtctgtctgttaaacacagctgatttcagtgggctttcccctggccctgggggagcagacactgactgggttgtgggcagaggagccatcctggcggagccctgctgcaggggagctccttcaggagccccatccggacctcttgcactgggctgcctttgcctccatttgccttcctgtatctgcaacaaaccttttaaaagtgttcactcttgctttttccagtatttcggtaatcagccatcttgctgtagtacaggatgacattgtcgaatgctctttgtatgtgtgcacacccccttactcccttactgcttcatacactccacaagtggtacagtattttgtgtcattgtaaaaatcaaaattggctttggatctttgtaatacacctgtacctgaaaaagtaaacaacattcttcaattactagccttcagcttgaaaagacatgctggagaagaaggaagggggaacccataggtgtggcgtggagccaagatgtactattcaactatgtgtttctgtttataaaaaacacataccatggaaccatggtgcttttgttcttagtttttgccgttagatcccttcaaactggaagttccttacaatatctttctcaggaaatattttgggaaatggggtaagagatggcaagtgtgagacgggctgtgtcagaggttgctacgtcatggatacagtgcagttccaagtgccataagtgtatgtacatatagttaataatgacactgttcatcaccattctaaaatactgttcttccaaccctatcttcaatgaccagtccagaaggggttaagctggattcatttgctctggcatgtgcattcccagcagggtgaagaaaggtttaaattaaagaatttattttctctctcccccttcctctttctcccagtctttgcataggagaatgttagacattcagaaattactgtttctgttttaaattgagtattgatttttttatattgactttgtattgagttctttttgaaagaataacaaaataaaatgcaggatctttgtaaagcctttgcactttcaacctctttatagcttgagttacttttgcagtgggaacaatgtaaatgacatttaaaagatttaaggtttcagaaagctgcatcccacaattgaacacaatgcatttttatttcaattcttggaactggtaggctattctttttaaaagggggtaaacttcgccctaaggctggtagaatgtatgttcacattatagtagacaggatttcatttgccttatatgtttatagattttttataattttcatcctacgttattaaaattagagcattgagtgttaaagaacttaatgaggagtctatatctgagattgctctcttccctggtgatgttttaactggtagataatttgttcttaaatatgtacttttgaagataggacagtttttatagtccatgaactgaatgttaaaaagttctgtatgcattctcagagaggattttaaagctatatagttcatccatcctttgcattatcaaaatgttaagtcaaatctgtaatactttggctaaaattcataaagtaagccctagagaaaatacttgaccaccaaatttttgcccaactatcatcacctcccttcccccgcctctgttcttgccttttgacatctacatggaagacaagttctttacagcaaatggtaagaggcaggtgacctggtgtgtttgctgtgttgtagttcattgcctggggcttgggactccttttttaatggagagactagctgtgcaggtgtgtgttggatagggataaagtgctcacccctgccctctctacagtagttggtggtagatttctctctcattttgcctcataatcactttcgagtgcatgtatttacctaagggctgtagctctgtgggatgctaccagcatattggactgacagaaattgattaccttgccactccaacctacgtactgagtgagtgctccagccactcagtgaaaccaacaaaagtgagtccttggtttaccttccaatctgggtcctgctgtgtaagtatccctaagtggggatgcatatttgtttgtgcgtttttatttccatatatgtgagcatttctctgagtgtattaccagacggatagcacatttatatgtcagacatcttaacatctgtgttatctgtagcaggtgtgtagctcagcagatacgtgtcattgtgtatatagctgagtgtgtgagggtgtctgtgtttctgcagtcccctgtgtttgagagatgacttaataaccctgtgttttgagaggtcgctctaaaccagtgacttttccctcccctgctttattcctttccctcactgacactggcttctcccgctagagtaaatggctttagcacagcactgtcttctggggagcctgctgtcctgcaggcaagtccattaaactctttcttgctttaggactctgaaaacagcaagaaacaaacaaacaaaggtcaagctctaagaaaattactgctcaaacttcactaccctggaagccttactagatatttcttaaggtaacttaaaaattgggctttatttttaaaaagtgataggttacttacagtagcacagaaatgttagcatatttatttaaatagtcctgcagcagagaccctgcgattgtaaagtgatttaagtatttctgggtagtgtttgtgatttacggatttgttactgaaaaacaaaaaaatcactactgtgaatttactactatgtaaccttgtggtcgtatttcattataaataaaataagaattgctcttctgcccaccgttcttgattggtattcagtgcagtagcgaaatgagatagtttagacactgttgaaataactgcattgagctttaaccaagtgtatgctcagaaaattcagttttggatcacattttgacaaaacatgttttggtcaaagaaaggaaaggctactaacacatttatcaggtaatgtatgtcacagtccgtgttccacccagccttgttatccccacattctttcaagataggagtcatcttggtttttcgggtgaaaaacggaaggtcagagaggaaggggcttgtccaaggtctcatgtctggttaacagaatttcaaactagatgtttgattctaacccctcagtccactgtaccttgaagtatggtctaaatgattcggcacttctggatgttgaggaaggacctagagacacatccttgaactagaacctggggtgagagttcattgggaggcaggatctcttctttcactttggatttacaccttgtcccttggaaagcttctccactatgctagcaaatatcttaggatatttgatggaaagaacttgagaatcccttctggaaaacccagcctttcagtgttaacacctgctgcaagacagggatgctgttgttctggcagcccccctttgcttttgcctggccccaccttctgctcccactctgctggcttgggcaagatgcgtgccttgggccttgggtgcagggaggcaggcaggggcttgacctggcctctctctggtgccatggcaacattatgccccaaacttcttccctggttggagtgagaggggctgtccacagccccatcctgtggggatctcaagccggagtccctggcctggcctccttgacgtaggtgttctcagcaagcagtttgcatcccaccgtctttctcacacttgcccccaagacttttgacagagcagacgtaaaacaggactcagaaaaccatttttctctgttcccatatgtagtaagttttgattcagttgtgcataaaccatagttttctgccctgctgtttgctttcaatggaagacagtaaagggaagatggtgctcacatctctccatgtgacatctcattaggaattaagatgcgatggattagaaatgtaaaacttcagaataaaattaaatttcagggctctataagtcccgttttcccaggtcctgttccgtttctacgtagataacccaatttgttttgtctatgaaataagcctctttagtgggttgttttagtctctccaacaaaagagcagattcctaaagccaggtgcagcactgtgaaaagtttctttcaatatggcaccaagactctaccatttatgtctctctcagcttacaaacatcagcgttttgtccttgtcatagtggaagaaagacacttactttaagctttggggacaaaggtgacaaaccccaggcttttatcttaaaagtgtctttggcacttcttttggcactgaaatggtatttgggaagcattatttgaatgtacagttgtttggttttgtatgtgcttatctttatctgagctttcacttgtagacatggccttttgttgtgaagttgctcatcatttaggagtgtttaattctaaaaagccttcagcctaagaaagcttcatctgtggggaccagagacttgttgctcagggagttagtgatgggacttgggcatctgatctgcaggtgacaagtttagttcaactgaagttgtagggaatttagacagttgcacatcattgccgttctaggggccttgtagaaagatgaaacagttgtttttcatttaccagcacctctcagttatagaggtaatggaacattcgcttacttttcatcatcattctttaaaaagggaacatacaaaaatctaaactatggcaataatttatttttataatagtttacggtaggctttaattaaatggcaaactcctctgggacccctaagttatggcgtgattagccaaatttgatttccaacagtcatttatggccataactattgcatagagtgcaggatgccagcaaagatgagggtgggggcagatactggctcagtgatttaactcacattatagatgaccccttcctcaacagaaatgctactgagagaaccagagaggcctgggccaggcaggtcttatttgagaggagattatttgataattgctttggttagaaggactttacatttcctgatttcaagtccagcaccaatttagaaagttcagagatgaaaccacctgtctttacctgacagagtcataacggtttgtgtaaaaatgtggtcagggaccttttttgttctttctgattagttaatactgtacattgtaaccaggaggggcagttttgccaaccagcctctgctcatggtcaccatatgtgtatgacaaggcctgagtgagttcctgcataaactgggtagtgggctcttttgacacatttgcaagcatgtaaatgaatgaatgacactaccagcaaccatctgtacaggtccatttacttacattcataaggtttatgctatgaaacttcttctcattgtgatgtcagtaacagagttagtgtctctgatggaatagtgtacctgtcacccaagttattttgttcctttttgggtcctccagtataatccccccctcatcccaattaactgtaaaatgttttacacatcacattttttatactgtaaacttggaaaataaactgaaatatcaaattg

SEQ ID NO: 697 - protein, 524 aa, Homo sapiens
MDTESTYSGYSYYSSHSKKSHRQGERTRERHKSPRNKDGRGSEKSVTIQPPTGEPLLGNDSTRTEEVQDDNWGETTTAITGTSEHSISQEDIARISKDMEDSVGLDCKRYLGLTVASFLGLLVFLTPIAFILLPPILWRDELEPCGTICEGLFISMAFKLLILLIGTWALFFRKRRADMPRVFVFRALLLVLIFLFVVSYWLFYGVRILDSRDRNYQGIVQYAVSLVDALLFIHYLAIVLLELRQLQPMFTLQVVRSTDGESRFYSLGHLSIQRAALVVLENYYKDFTIYNPNLLTASKFRAAKHMAGLKVYNVDGPSNNATGQSRAMIAAAARRRDSSHNELYYEEAEHERRVKKRKARLVVAVEEAFIHIQRLQAEEQQKAPGEVMDPREAAQAIFPSMARALQKYLRITRQQNYHSMESILQHLAFCITNGMTPKAFLERYLSAGPTLQYDKDRWLSTQWRLVSDEAVTNGLRDGIVFVLKCLDFSLVVNVKKIPFIILSEEFIDPKSHKFVLRLQSETSV

SEQ ID NO: 698 - DNA, 136 bp, Homo sapiens; identical to SEQ ID NO: 381

SEQ ID NO: 699 - DNA, 20 bp, Homo sapiens
tctgctggccactgtgactg

SEQ ID NO: 700 - DNA, 21 bp, Homo sapiens
gaagaaaaagagctcgcctcg

SEQ ID NO: 701 - DNA, 20 bp, Homo sapiens
ccagctagagaagccatgcc
